(19) United States
(12) Patent Application Publication
(10) Pub. No.: US 2023/0051423 A1
(43) Pub. Date: Feb. 16, 2023

(54) ACTIVATABLE CYTOKINE POLYPEPTIDES AND METHODS OF USE THEREOF

(71) Applicant: Werewolf Therapeutics, Inc., Cambridge, MA (US)

(72) Inventors: William WINSTON, West Newton, MA (US); Daniel HICKLIN, Boston, MA (US); Jose Andres SALMERON-GARCIA, Acton, MA (US); Heather BRODKIN, West Newton, MA (US); Cynthia SEIDEL-DUGAN, Belmont, MA (US)

(21) Appl. No.: 17/741,275

(22) Filed: May 10, 2022

Related U.S. Application Data
(63) Continuation of application No. PCT/US2020/060624, filed on Nov. 14, 2020.
(60) Provisional application No. 62/935,605, filed on Nov. 14, 2019.

(51) Int. Cl. A61K 38/20; A61K 38/21; C12N 15/63; A61P 35/00; A61P 31/12

(52) U.S. Cl. CPC A61K 38/2013; A61K 38/208; A61K 38/212; A61K 38/215; A61K 38/217; C12N 15/63; A61P 35/00; A61P 31/12

(57) ABSTRACT

The disclosure features fusion proteins that are conditionally active variants of a cytokine of interest. In one aspect, the full-length polypeptides of the invention have reduced or minimal cytokine-receptor activating activity even though they contain a functional cytokine polypeptide. Upon activation, e.g., by cleavage of a linker that joins a blocking moiety, e.g. a steric blocking polypeptide, in sequence to the active cytokine, the cytokine can bind its receptor and effect signaling. Typically, the fusion proteins further comprise an in vivo half-life extension element, which may be cleaved from the cytokine in the tumor microenvironment.

[0001] This application is a continuation of International Patent Application No. PCT/US2020/060624, filed on Nov. 14, 2020, which claims the benefit of U.S. Provisional Application No. 62/935,605, filed on Nov. 14, 2019, each of which are incorporated herein by reference.

### SEQUENCE LISTING

[0002] The instant application contains a Sequence Listing which has been submitted electronically in ASCII format and is hereby incorporated by reference in its entirety. Said ASCII copy, created on Nov. 12, 2020, is named 761146_000146_SL.txt and is 2,974,211 bytes in size.

### BACKGROUND

[0003] The development of mature immunocompetent lymphoid cells from less-committed precursors, their subsequent antigen-driven immune responses, and the suppression of these and unwanted autoreactive responses are highly dependent and regulated by cytokines (including interleukin-2 [IL-2], IL-4, IL-7, IL-9, IL-15, and IL-21) that utilize receptors in the common γ-chain (γc) family (Rochman et al., 2009) and family members including IL-12, 18 and 23. IL-2 is essential for thymic development of Treg cells and critically regulates several key aspects of mature peripheral Treg and antigen-activated conventional T cells. Because of its potent T cell growth factor activity in vitro, IL-2 has been extensively studied in part because this activity offered a potential means to directly boost immunity, e.g., in cancer and AIDS-HIV patients, or a target to antagonize unwanted responses, e.g., transplantation rejection and autoimmune diseases. Although in vitro studies with IL-2 provided a strong rationale for these studies, the function of IL-2 in vivo is clearly much more complex as first illustrated in IL-2-deficient mice, where a rapid lethal autoimmune syndrome, not lack of immunity, was observed (Sadlack et al., 1993, 1995). Similar observations were later made when the gene encoding IL-2Rα (Il2ra) and IL-2Rβ (Il2rb) were individually ablated (Suzuki et al., 1995; Willerford et al., 1995).

[0004] The present invention refers to conditionally active and/or targeted cytokines for use in the treatment of cancer and other diseases dependent on immune up or down regulation. For example, the antitumoral activity of some cytokines is well known and described and some cytokines have already been used therapeutically in humans. Cytokines such as interleukin-2 (IL-2) and interferon α (IFNα) have shown positive antitumoral activity in patients with different types of tumors, such as kidney metastatic carcinoma, hairy cell leukemia, Kaposi sarcoma, melanoma, multiple myeloma, and the like. Other cytokines like IFNβ, the Tumor Necrosis Factor (TNF) α, TNFβ, IL-1, 4, 6, 12, 15 and the CSFs have shown a certain antitumoral activity on some types of tumors and therefore are the object of further studies.

### SUMMARY

[0005] Provided herein are therapeutic proteins, nucleic acids (e.g., DNA, RNA, mRNA) that encode the proteins, and compositions and methods of using the proteins and nucleic acids for the treatment of a disease or disorder, such as proliferative disease, a tumorous disease, an inflammatory disease, an immunological disorder, an autoimmune disease, an infectious disease, a viral disease, an allergic reaction, a parasitic reaction, graft-versus-host disease and the like. In certain embodiments, the fusion protein the amino acid sequence of any one of SEQ ID NOs.: 193-271. Certain fusion proteins disclosed herein are referred to as ACP200-208, ACP211, ACP213-ACP215, ACP240-ACP245, ACP247, ACP284-ACP292, ACP296-ACP300, ACP302-ACP306, ACP309-ACP314, ACP336-ACP359, ACP371-ACP379, ACP383-ACP434, ACP439-ACP447, or ACP451-ACP471. This disclosure also relates to nucleic acids (e.g., DNA, RNA, mRNA) that encode the fusion proteins, methods of making fusion proteins, compositions comprising a fusion protein, as well as methods of using the fusion proteins to treat cancer including combination of two or more fusion proteins and one or more fusion protein in combination with another therapeutic agent.

[0006] The invention features fusion proteins that are conditionally active variants of a cytokine of interest. Cytokines of particular interest include IL-2, IL-12, and IFN. In one aspect, the full-length polypeptides of the invention have reduced or minimal cytokine-receptor activating activity even though they contain a functional cytokine polypeptide. Upon activation, e.g., by cleavage of a linker that joins a blocking moiety, e.g. a steric blocking polypeptide, in sequence to the active cytokine, the cytokine, e.g., IL-2, IL-7, IL-12, IL-15, IL-18, IL-21, IL-23, IFNalpha, IFNbeta, IFNgamma, TNFalpha, lymphotoxin, TGF-beta1, TGFbeta2, TGFbeta3, GM-CSF, CXCL10, CCL19, CCL20, CCL21 or functional fragment or mutein or functional variant or a subunit of any of the foregoing, can bind its receptor and effect signaling. If desired, the full-length polypeptides can include a blocking polypeptide moiety that also provides additional advantageous properties. For example, the full-length polypeptide can contain a blocking polypeptide moiety that also extends the serum half-life and/or targets the full-length polypeptide to a desired site of cytokine activity. Alternatively, the full-length fusion polypeptides can contain a serum half-life extension element and/or targeting domain that are distinct from the blocking polypeptide moiety. Preferably, the fusion protein contains at least one element or domain capable of extending in vivo circulating half-life. Preferably, this element is removed enzymatically in the desired body location (e.g. protease cleavage in the tumor microenvironment), restoring pharmacokinetic properties to the payload molecule (e.g. IL2, IL-12, IFNb or IFNa) substantially similar to the naturally occurring payload molecule. The fusion proteins may be targeted to a desired cell or tissue.

[0007] The fusion polypeptides typically comprise a cytokine polypeptide [A], a blocking moiety [D], optionally a half-life extension moiety [H], and a protease-cleavable polypeptide linker. The cytokine polypeptide and the blocking moiety and the optional half-life extension element when present are operably linked by the protease-cleavable polypeptide linker and the fusion polypeptide has attenuated cytokine receptor activating activity, e.g., the cytokine-receptor activating activity of the fusion polypeptide is at least about 10× less than the cytokine receptor activating activity of the polypeptide that contains the cytokine polypeptide that is produced by cleavage of the protease cleavable linker. Some preferred fusion polypeptides are of one of formula (I)-(VI):

[A]-[L1]-[H]-[L2]-[D] (I);

[D]-[L2]-[H]-[L1]-[A] (II);

[A]-[L1]-[D]-[L2]-[H] (III);

[H]-[L2]-[D]-[L1]-[A] (IV);

[H]-[L1]-[A]-[L2′]-[D] (V);

[D]-[L1]-[A]-[L2′]-[H] (VI);
[0008] wherein A is a cytokine polypeptide, D is a blocking moiety, H is a half-life extension moiety, L1 is a protease-cleavable polypeptide linker, L2 is an polypeptide linker that is optionally protease-cleavable, and L2′ is a protease-cleavable polypeptide linker. L1 and L2 or L1 and L2′ can be have the same or different amino acid sequence and or protease-cleavage site (when L2 is protease-cleavable) as desired.

[0009] In some aspects, the fusion proteins described herein are conditionally active variants of IL-12, IL-2, or IFN. In embodiments, the fusion protein can contain an IL-2 polypeptide. The fusion protein containing an IL-2 polypeptide can comprise or consist of the amino acid sequence of SEQ ID NOs. 257-300, 302-317, 325-353, 355-365, 366, 372-381, 383-385, 388-420, 579-608, and 636-646. The fusion proteins disclosed as SEQ ID NOs. 257-300, 302-317, 325-353, 355-365, 366, 372-381, 383-385, 388-420, 579-608, 636-646 are referred to herein as ACP289-ACP292, ACP296-ACP302, WW0301, ACP304-ACP306, ACP309-ACP313, WW0353, ACP414, ACP336-ACP398, WW0472-WW0477, ACP406-ACP426, ACP439-ACP447, ACP451-ACP471, WW0729, WW0734-WW0792, ACP101, ACP293-ACP295, ACP316-ACP335, ACP427-ACP438, and ACP448-ACP450. For example, the fusion protein can comprise the amino acid sequence of SEQ ID NO: 272. The fusion protein can comprise the amino acid sequence of SEQ ID NO: 286. The fusion protein can comprise the amino acid sequence of SEQ ID NO:362. The fusion protein can comprise the amino acid sequence of SEQ ID NO:336. The fusion protein can comprise the amino acid sequence of SEQ ID NO: 348. The fusion protein can comprise the amino acid sequence of SEQ ID NO: 363. The fusion protein can comprise the amino acid sequence of SEQ ID NO: 580.

[0010] In embodiments, the fusion protein can contain IL-12. The fusion protein containing an IL-12 polypeptide can comprise or consist of the amino acid sequence of any one of SEQ ID NOs. 368-371, 434-440, 453-519, or 523-538. The fusion proteins disclosed as SEQ ID NOs. 368-371, 434-440, 453-519, or 523-538 are referred to herein as ACP240-ACP245, ACP247, ACP285-ACP288, WW0641, WW0649-WW0652, WW0662-WW0725, WW0765-WW0772, and WW0796-WW0803. For example, the fusion protein can comprise the amino acid sequence of SEQ ID NO: 424. For example, the fusion protein can comprise the amino acid sequence of SEQ ID NO: 428. For example, the fusion protein can comprise the amino acid sequence of SEQ ID NO: 541. For example, the fusion protein can comprise the amino acid sequence of SEQ ID NO: 556. For example, the fusion protein can comprise the amino acid sequence of SEQ ID NO: 560. For example, the fusion protein can comprise the amino acid sequence of SEQ ID NO: 568. For example, the fusion protein can comprise the amino acid sequence of SEQ ID NO: 573.

[0011] In embodiments, the fusion protein contains IFN. The fusion protein containing an IFN polypeptide can comprise or consist of the amino acid sequence of any one of SEQ ID NOs. 421-430, and 539-578. The fusion proteins disclosed as SEQ ID NOs. 421-430, and 539-578 can be referred to herein as ACP200-ACP209, WW0644-WW0648, WW0781-WW0786, WW0815-WW0822, WW0831-WW0834, WW0737-WW0748, and WW0787-WW0790.

[0012] In some aspects, the fusion polypeptide disclosed herein can be covalently or non-covalently bonded to a second polypeptide chain. For example, a fusion polypeptide can dimerize (i.e. form a dimer) or a portion of a fusion polypeptide may associate with another polypeptide, for example, to form a functional binding site for a cytokine polypeptide or serum albumin. In certain embodiments, the second polypeptide chain and the blocking moiety on the fusion polypeptide are complementary and together form a functional binding site that has specificity for the cytokine polypeptide contained in the fusion polypeptide. Exemplary functional binding sites that can be formed by the blocking moiety of the fusion polypeptide and a complimentary second polypeptide include antigen binding sites of antibodies, such as a Fab fragment of an antibody or a portion thereof. For example, one chain of a Fab that binds the cytokine can be the blocking moiety of the fusion polypeptide, e.g., a VH-CH1, and the complementary VL-CL can be part of the second polypeptide. In such situations, the blocking moiety of the fusion protein i.e., VH-CH1 and the second polypeptide that comprises the complementary VL-CL, can associate to form a functional binding site with specificity for the cytokine polypeptide contained within the fusion protein (e.g., IL-2, IL-12, IFNalpha, IFNbeta) and attenuate cytokine polypeptide activity.

[0013] In embodiments, the fusion protein containing an IL-2 cytokine polypeptide can be bonded covalently or noncovalently to a second polypeptide chain. The second polypeptide chain can contain an antibody light chain VL-CL that comprises or consists of the amino acid sequence of SEQ ID NO: 263, 264, or 333. Such a second polypeptide can bond with a complimentary VH-CH1 polypeptide contained within the fusion protein, e.g., as contained within SEQ ID NOS: 362, 363, 325, 286, 579, 581, or 582. The second polypeptide chain disclosed as SEQ ID NOs. 263, 264, and 333 can be referred herein as WW0523 (ACP381), WW0524 (ACP382), or WW0556 (ACP414).

[0014] In embodiments, the fusion polypeptide can comprise or consist of the amino acid sequence of SEQ ID NOs. 362, 363, 325, 286, 579, 581, or 582 and the second polypeptide chain can comprise or consist of the amino acid sequence of SEQ ID NOs: 263, 264, or 333. The fusion polypeptide disclosed as SEQ ID NOs. 362, 363, 325, 286, 579, 581, or 582 can be referred to as WW0520 (ACP378), WW0521 (ACP379), WW0548 (ACP406), WW0621 (ACP457), WW0729, WW0735, or WW0736, and the second polypeptide chain disclosed as SEQ ID NOs. 263, 264, and 333 can be referred herein as WW0523 (ACP381), WW0524 (ACP382), or WW0556 (ACP414). For example, the fusion protein can comprise or consist the amino acid sequence of SEQ ID NO: 362 and the second polypeptide chain can comprise or consist the amino acid sequence of SEQ ID NO: 263. For example, the fusion protein can comprise or consist the amino acid sequence of SEQ ID NO: 362 and the second polypeptide chain can comprise or consist the amino acid sequence of SEQ ID NO: 264. For example, the fusion protein can comprise or consist the amino acid sequence of SEQ ID NO: 362 and the second polypeptide chain can comprise or consist the amino acid sequence of SEQ ID NO: 333. For example, the fusion protein can comprise or consist of an amino acid sequence of SEQ ID NO: 363 and the second polypeptide chain can comprise or consist of an amino acid sequence of SEQ ID NO: 263. For example, the fusion protein can comprise or consist of an amino acid sequence of SEQ ID No. 363 and the second polypeptide chain can comprise or consist of an amino acid sequence of SEQ ID NO: 264. For example, the fusion protein can comprise or consist of an amino acid sequence of SEQ ID NO: 363 and the second polypeptide chain can comprise or consist of an amino acid sequence of SEQ ID NO: 333. For example, the fusion protein can comprise or consist of an amino acid sequence of SEQ ID NO: 325 and the second polypeptide chain can comprise or consist of an amino acid sequence of SEQ ID NO: 264. For example, the fusion protein can comprise or consist of an amino acid sequence of SEQ ID NO: 325 and the second polypeptide chain can comprise or consist of an amino acid sequence of SEQ ID NO: 333. For example, the fusion protein can comprise or consist of an amino acid sequence of SEQ ID NO: 325 and the second polypeptide chain can comprise or consist of an amino acid sequence of SEQ ID NO: 263. For example, the fusion protein can comprise or consist of an amino acid sequence of SEQ ID NO: 286 and the second polypeptide chain can comprise or consist of an amino acid sequence of SEQ ID NO: 263. For example, the fusion protein can comprise or consist of an amino acid sequence of SEQ ID NO: 286 and the second polypeptide chain can comprise or consist of an amino acid sequence of SEQ ID NO: 264. For example, the fusion protein can comprise or consist of an amino acid sequence of SEQ ID NO: 286, and the second polypeptide can comprise or consist of an amino acid sequence of SEW ID NO: 333.

[0015] For example, the fusion protein can comprise or consist of an amino acid sequence of SEQ ID NO: 579 and the second polypeptide chain can comprise or consist of an amino acid sequence of SEQ ID NO: 263. For example, the fusion protein can comprise or consist of an amino acid sequence of SEQ ID NO: 579 and the second polypeptide chain can comprise or consist of an amino acid sequence of SEQ ID NO: 264. For example, the fusion protein can comprise or consist of an amino acid sequence of SEQ ID NO: 579 and the second polypeptide chain can comprise or consist of an amino acid sequence of SEQ ID NO: 233. For example, the fusion protein can comprise or consist of SEQ ID NO: 581 and the second polypeptide chain can comprise or consist of SEQ ID NO.: 263. For example, the fusion protein can comprise or consist of SEQ ID NO: 581 and the second polypeptide chain can comprise or consist of SEQ ID NO.: 264. For example, the fusion protein can comprise or consist of SEQ ID NO: 581 and the second polypeptide chain can comprise or consist of SEQ ID NO.: 333. For example, the fusion protein can comprise or consist of SEQ ID NO: 582 and the second polypeptide chain can comprise or consist of SEQ ID NO: 263. For example, the fusion protein can comprise or consist of SEQ ID NO: 582 and the second polypeptide chain can comprise or consist of SEQ ID NO: 264. For example, the fusion protein can comprise or consist of SEQ ID NO: 582 and the second polypeptide chain can comprise or consist of SEQ ID NO: 333.

[0016] As described herein targeting is accomplished through the action of a blocking polypeptide moiety that also binds to a desired target, or through a targeting domain. The domain that recognizes a target antigen on a preferred target (for example a tumor-specific antigen), may be attached to the cytokine via a cleavable or non-cleavable linker. If attached by a non-cleavable linker, the targeting domain may further aid in retaining the cytokine in the tumor, and it may be considered a retention domain. The targeting domain does not necessarily need to be directly linked to the payload molecule, and it may be linked directly to another element of the fusion protein. This is especially true if the targeting domain is attached via a cleavable linker.

[0017] In one aspect is provided a fusion polypeptide comprising a cytokine polypeptide, or functional fragment, a mutein thereof, a functional variant thereof or a subunit thereof, and a blocking moiety, e.g. a steric blocking domain. The blocking moiety is fused to the cytokine polypeptide, directly or through a linker, and can be separated from the cytokine polypeptide by cleavage (e.g., protease mediated cleavage) of the fusion polypeptide at or near the fusion site or linker or in the blocking moiety. For example, when the cytokine polypeptide is fused to a blocking moiety through a linker that contains a protease cleavage site, the cytokine polypeptide is released from the blocking moiety and can bind its receptor, upon protease mediated cleavage of the linker. The linker is designed to be cleaved at the site of desired cytokine activity, for example in the tumor microenvironment, avoiding off-target cytokine activity and reducing overall toxicity of cytokine therapy.

[0018] The blocking moiety can also function as a serum half-life extension element. In some embodiments, the fusion polypeptide further comprises a separate serum half-life extension element. In some embodiments, the fusion polypeptide further comprises a targeting domain. In various embodiments, the serum half-life extension element is a water-soluble polypeptide such as optionally branched or multi-armed polyethylene glycol (PEG), full length human serum albumin (HSA) or a fragment that preserves binding to FcRn, an Fc fragment, or a nanobody that binds to FcRn directly or to human serum albumin.

[0019] In addition to serum half-life extension elements, the pharmaceutical compositions described herein preferably comprise at least one, or more targeting domains that bind to one or more target antigens or one or more regions on a single target antigen. It is contemplated herein that a polypeptide construct of the invention is cleaved, for example, in a disease-specific microenvironment or in the blood of a subject at the protease cleavage site and that the targeting domain(s) will bind to a target antigen on a target cell. At least one target antigen is involved in and/or associated with a disease, disorder or condition. Exemplary target antigens include those associated with a proliferative disease, a tumorous disease, an inflammatory disease, an immunological disorder, an autoimmune disease, an infectious disease, a viral disease, an allergic reaction, a parasitic reaction, a graft-versus-host disease or a host-versus-graft disease.

[0020] In some embodiments, a target antigen is a cell surface molecule such as a protein, lipid or polysaccharide. In some embodiments, a target antigen is a on a tumor cell, virally infected cell, bacterially infected cell, damaged red blood cell, arterial plaque cell, or fibrotic tissue cell.

[0021] Target antigens, in some cases, are expressed on the surface of a diseased cell or tissue, for example a tumor or a cancer cell. Target antigens for tumors include but are not limited to Fibroblast activation protein alpha (FAPa), Trophoblast glycoprotein (5T4), Tumor-associated calcium signal transducer 2 (Trop2), Fibronectin EDB (EDB-FN), fibronectin EIIIB domain, CGS-2, EpCAM, EGFR, HER-2, HER-3, c-Met, FOLR1, FAP, and CEA. Pharmaceutical compositions disclosed herein, also include proteins comprising two antigen binding domains that bind to two different target antigens known to be expressed on a diseased cell or tissue. Exemplary pairs of antigen binding domains include but are not limited to EGFR/CEA, EpCAM/CEA, and HER-2/HER-3.

[0022] In some embodiments, the targeting polypeptides independently comprise a scFv, a VH domain, a VL domain, a non-Ig domain, or a ligand that specifically binds to the target antigen. In some embodiments, the targeting polypeptides specifically bind to a cell surface molecule. In some embodiments, the targeting polypeptides specifically bind to a tumor antigen. In some embodiments, the targeting polypeptides specifically and independently bind to a tumor antigen selected from at least one of EpCAM, EGFR, HER-2, HER-3, cMet, CEA, and FOLR1. In some embodiments, the targeting polypeptides specifically and independently bind to two different antigens, wherein at least one of the antigens is a tumor antigen selected from EpCAM, EGFR, HER-2, HER-3, cMet, CEA, and FOLR1. In some embodiments, the targeting polypeptide serves as a retention domain and is attached to the cytokine via a non-cleavable linker.

[0023] As described herein, the cytokine blocking moiety can bind to the cytokine and thereby block activation of the cognate receptor of the cytokine.

[0024] This disclosure also related to nucleic acids, e.g., DNA, RNA, mRNA, that encode the conditionally active proteins described herein, as well as vectors and host cells that contain such nucleic acids.

[0025] This disclosure also relates to pharmaceutical compositions that contain a conditionally active protein, nucleic acid that encodes the conditionally active protein, and vectors and host cells that contain such nucleic acids. Typically, the pharmaceutical composition contains one or more physiologically acceptable carriers and/or excipients.

[0026] The disclosure also relates to therapeutic methods that include administering to a subject in need thereof an effective amount of a conditionally active protein, nucleic acid that encodes the conditionally active protein, vector or host cells that contain such a nucleic acid, and pharmaceutical compositions of any of the foregoing. Typically, the subject has, or is at risk of developing, a proliferative disease, a tumorous disease, an inflammatory disease, an immunological disorder, an autoimmune disease, an infectious disease, a viral disease, an allergic reaction, a parasitic reaction, a graft-versus-host disease or a host-versus-graft disease.

[0027] The disclosure also relates to the use of a conditionally active protein, nucleic acid that encodes the conditionally active protein, vector or host cells that contain such a nucleic acid, and pharmaceutical compositions of any of the foregoing, for treating a subject in need thereof. Typically, the subject has, or is at risk of developing, a proliferative disease, a tumorous disease, an inflammatory disease, an immunological disorder, an autoimmune disease, an infectious disease, a viral disease, an allergic reaction, a parasitic reaction, a graft-versus-host disease or a host-versus-graft disease.

[0028] The disclosure also relates to the use of a conditionally active protein, nucleic acid that encodes the conditionally active protein, vector or host cells that contain such a nucleic acid for the manufacture of a medicament for treating a disease, such as a proliferative disease, a tumorous disease, an inflammatory disease, an immunological disorder, an autoimmune disease, an infectious disease, a viral disease, an allergic reaction, a parasitic reaction, a graft-versus-host disease or a host-versus-graft disease.

### BRIEF DESCRIPTION OF THE DRAWINGS

[0029] FIGS. 1A-1E are a series of graphs showing activity of IL-2 fusion proteins in a HEKBlue IL-2 reporter assay in the presence of HSA. Squares depict activity of the uncut IL-2 polypeptide (intact) and triangles depict the activity of the cut polypeptide (cleaved). Circles depict activity of control IL-2. EC50 for each IL-12. EC50 values for each are shown in the table. FIGS. 1A-1E also depict results of the protein cleavage assay for each IL-2 polypeptide. Constructs tested and depicted include WW0475 (FIG. 1A), WW0517 (FIG. 1B), WW0548/556 (FIG. 1C), WW0735/523 (FIG. 1D), and WW0621/523 (FIG. 1E). FIG. 1F is a graph showing activity of a non-cleavable control, WW0729/523. FIG. 1F also depicts results of a protein cleavage assay for the non-cleavable control.

[0030] FIGS. 2A-2L are a series of graphs showing activity of fusion proteins in an IL-2 luciferase reporter assay. Closed squares depict activity of the uncut IL-2 polypeptide (intact) and open squares depict the activity of the cut IL-2 polypeptide (cleaved). Circles depict activity of the control (human IL-2). EC50 values for each are shown in the table (human IL-2). EC50 values for each are shown in the table. Constructs tested and depicted include WW0521/WW0556 (FIG. 2A), WW0521/WW0524 (FIG. 2B), WW0521/WW0523 (FIG. 2C), WW0520/WW0524 (FIG. 2D), WW0517 (FIG. 2E), WW0516 (FIG. 2F), WW0417 (FIG. 2G), WW0317 (FIG. 2H), WW0317 (FIG. 2I), and WW0520/WW0523 (FIG. 2J), WW0621/WW0523 (FIG. 2K), WW0048 (FIG. 2L).

[0031] FIGS. 3A-3J are a series of graphs showing activity of fusion proteins in an IL-2 T-Blast assay. In FIGS. 3B, 3D, 3J squares and in FIGS. 3A, 3C, 3E, 3I triangles depict activity of the uncut IL-2 polypeptide (intact), and in FIGS. 3B, 3D, 3J triangles, and in FIGS. 3A, 3C and 3E-3I upside down triangles depict the activity of the cut polypeptide (cleaved). Circles (FIGS. 3B, 3D, 3J) or squares (FIGS. 3A, 3C, 3E-3I) depict activity of the control human IL-2. EC50 values for each are shown in the table. Constructs tests and depicted include WW0317 (FIG. 3A), WW0516 (FIG. 3B), WW0354 (FIG. 3C), WW0517 (FIG. 3D), WW0621/0523 (FIG. 3E), WW0521/524 (FIG. 3F), WW0520/0523 (FIG. 3G), WW0729/523 (FIG. 3H), and WW0735/523 (FIG. 3I), WW0520/524 (FIG. 3J).

[0032] FIGS. 4A-4G are graphs that show results of analyzing WW0475, WW0520/0523, WW0548/0524, WW0548/0556, WW0517, WW0621/0523, and WW0619 IL-2 fusion proteins in a syngeneic MC38 mouse tumor model. Each graph shows average tumor volume (Mean+/−SEM) over time in mice treated with different doses of each of the fusion proteins as indicated. The data show tumor volume decreasing over time in a dose-dependent manner.

[0033] FIGS. 5A-5C are a series of spider plots showing activity of fusion proteins in the MC38 mouse syngeneic model corresponding to the data shown in FIG. 4A-4G. Each line in the plots is the tumor volume over time for a single mouse. FIG. 5A contains the data corresponding to vehicle treatment and fusion proteins WW0517 and WW0520/523. FIG. 5B contains the data corresponding to treatment with fusion proteins WW0548/0524, WW0548/0556, and WW0475. FIG. 5C contains the data corresponding to treatment with fusion proteins WW0619 and WW0621/0523.

[0034] FIGS. 6A-6C are a series of spider plots showing the impact of fusion proteins on body weight in an MC38 mouse syngeneic model corresponding to the data shown in FIGS. 5A-5C. Each line in the plots is the body weight over time for a single mouse. FIG. 6A contains the data corresponding to vehicle treatment and fusion proteins WW0517 and WW0520/523. FIG. 6B contains the data corresponding to treatment with fusion proteins WW0548/0524, WW0548/0556, and WW0475. FIG. 6C contains the data corresponding to treatment with fusion proteins WW0619 and WW0621/0523.

[0035] FIGS. 7A-7Q are a series of graphs showing activity of fusion proteins in an HEKBlue IL-12 reporter assay. FIGS. 7A-7Q depict IL-12/STAT4 activation in a comparison of human p40/murine p35 IL-12 or human IL-12 fusion proteins to chimeric IL-12 (mouse p35/human p40) or recombinant human IL-12 (control). Squares depict activity of the uncut IL-12 polypeptide (intact) and triangles depict the activity of the cut IL-12 polypeptide (cleaved). Circles depict activity of the control. EC50 values for each are shown in the table.

[0036] FIGS. 8A-8D are a series of graphs showing activity of fusion proteins in an IL12 T-Blast assay. FIGS. 8A-8D depicts activation of IL-12 signaling in a comparison of a human p40/murine p35 IL12 or human IL12 fusion protein to control, chimeric IL-12 (human p40/murine p35 IL12) or recombinant human IL12. Squares depict activity of the uncut IL-12 polypeptide (intact) and triangles depict the activity of the cut IL-12 polypeptide (cleaved). Circles depict activity of the control chimeric IL-12 or recombinant human IL-12. EC50 values for each are shown in the table.

[0037] FIGS. 9A-9C are a series of graphs showing activity of fusion proteins in an IL-12 luciferase reporter assay. FIGS. 9A-9B depict activation of IL-12 signaling in a comparison of a human p40/murine p35 IL-12 fusion protein to recombinant human IL-12 (control). FIG. 9C depicts activation of IL-12 signaling in comparison of a human IL-12 (human p40/human p35 IL-12) fusion protein to recombinant human IL12. Closed squares depict activity of the uncut IL-12 polypeptide (intact) and open squares depict the activity of the cut polypeptide (cleaved). Circles depict activity of the control. EC50 values for each are shown in the table.

[0038] FIGS. 10A-10J are a series of graphs showing activity of fusion proteins in the B16-Blue IFN-α/β reporter assay. FIGS. 10A-10J depict activation of the IFN-α/β pathway in a comparison of mouse IFNα fusion protein to mouse IFNα (control). Squares depict activity of the uncut IFNα polypeptide (intact) and triangles depict the activity of the cut IFNα polypeptide (cleaved). Circles depict activity of the control (mouse IFNα). EC50 values for each are shown in the table. FIGS. 10A-10J also depict results of the protein cleavage assay for each IFNα fusion protein. Each IFNα fusion protein was run on an SDS-PAGE gel in both cleaved and uncleaved form. As can be seen in the gel, cleavage was complete.

[0039] FIGS. 11A-11B are graphs depicting results from a HEK-Blue IL-12 reporter assay performed on human p40/murine p35 IL12 fusion proteins before and after protease cleavage. Constructs ACP35 (FIG. 11A) and ACP34 (FIG. 11B) were tested. Analysis was performed based on quantification of Secreted Alkaline Phosphatase (SEAP) activity using the reagent QUANTI-Blue® (InvivoGen). Results confirm that IL12 protein fusion proteins are active.

[0040] FIGS. 12A-12F show a series of graphs depicting the results of HEK-blue assay of four IL-12 fusion proteins, before and after cleavage by MMP9. Analysis was performed based on quantification of Secreted Alkaline Phosphatase (SEAP) activity using the reagent QUANTI-Blue (InvivoGen). The data show greater activity in the cleaved IL12 than in the full fusion protein. Constructs tested were ACP06 (FIG. 12A), ACP07 (FIG. 12C), ACP08 (FIG. 12B), ACP09 (FIG. 12D), ACP10 (FIG. 12E), ACP11 (FIG. 12F).

[0041] FIG. 13 shows results of protein cleavage assay. Fusion protein ACP11 was run on an SDS-PAGE gel in both cleaved and uncleaved form. As can be seen in the gel, cleavage was complete.

[0042] FIG. 14 is a schematic which depicts a non-limiting example of an inducible cytokine protein, wherein the construct is activated upon protease cleavage of a linker attached between two subunits of the cytokine.

[0043] FIGS. 15A-15D are graphs depicting results from a HEK-Blue assay performed on human p40/murine p35 IL12 fusion proteins before and after protease cleavage. Results confirm that IL12 protein fusion proteins are active. Each proliferation assay was performed with HSA or without HSA.

[0044] FIGS. 16A-16F area series of graphs showing activity of exemplary IFN7 fusion proteins compared to activity of mouse IFN7 control using WEHI 279 cell survival assay. Each assay was performed with medium containing HSA (+HSA) or not containing HSA (−HSA). Each fusion protein comprises an anti-HSA binder, and both uncleaved and MMP9 protease cleaved versions of the fusion protein were used in each assay.

[0045] FIGS. 17A-17F are a series of graphs showing activity of exemplary IFN7 fusion proteins compared to activity of mouse IFN7 control using B16 reporter assay. Each assay was performed with medium containing HSA (+HSA) or not containing HSA (−HSA). Each fusion protein comprises an anti-HSA binder, and both uncleaved and MMP9 protease cleaved versions of the fusion protein were used in each assay.

[0046] FIGS. 18A-18B show results of protein cleavage assay, as described in Example 2. Two constructs, ACP31 (IFN-α a fusion protein; FIG. 18A) and ACP55 (IFN-γ fusion protein; 18B), were run on an SDS-PAGE gel in both cleaved and uncleaved form. As can be seen in the gel, cleavage was complete.

[0047] FIGS. 19A-19B are a series of graphs (FIGS. 19A and 19B) showing activity of exemplary IFN7 fusion proteins before and after protease cleavage using B16 reporter assay. Each assay was performed with culture medium containing HSA, and each fusion protein comprises an anti-HSA binder. Both uncleaved and MMP9 protease cleaved versions of the fusion protein were used in each assay.

[0048] FIGS. 20A-20B are a series of graphs (FIG. 20A and FIG. 20B) showing activity of exemplary IFNα fusion proteins before and after cleavage using a B16 reporter assay. Each assay was performed with medium containing HSA, and each fusion protein comprises an anti-HSA binder. Both uncleaved and MMP9 protease cleaved versions of the fusion protein were used in each assay.

[0049] FIGS. 21A-21D are a series of graphs depicting the results of tumor growth studies using the MC38 cell line. FIG. 21A-C show the effect of IFN7 and IFN7 fusion proteins on tumor growth when injected intraperitoneally (IP) using different dosing levels and schedules (ug=micrograms, BID=twice daily, BIW=twice weekly, QW=weekly). FIG. 21D shows the effect of intratumoral (IT) injection of IFN7 and IL-2 on tumor growth.

[0050] FIGS. 22A-22B are a series of graphs showing activity of exemplary IFN7 fusion proteins (ACP51 (FIG. 22A), and ACP52 (FIG. 22B)) cleaved by MMP9 protease compared to activity of uncleaved fusion proteins using B16 reporter assay. Each fusion protein comprises an anti-HSA binder and a tumor targeting domain.

[0051] FIGS. 23A-23B are a series of graphs showing activity of exemplary IFN7 fusion proteins (ACP53 and ACP54) cleaved by MMP9 protease compared to activity of uncleaved fusion proteins using B16 reporter assay. Each fusion protein comprises IFN7 directly fused to albumin.

[0052] FIGS. 24A-24D are graphs depicting results from a HEK-Blue IL-2 reporter assay performed on IL-2 fusion proteins and recombinant human IL2 (Rec hIL-2). Analysis was performed based on quantification of Secreted Alkaline Phosphatase (SEAP) activity using the reagent QUANTI-Blue (InvivoGen). FIG. 24A shows results of IL-2 constructs ACP132 and ACP133 with and without albumin. FIG. 24B shows results of IL-2 construct ACP16 cleaved and uncleaved. Results of a protein cleavage assay of ACP16 in cleaved and uncleaved forms is also depicted. FIG. 24C shows results of IL-2 construct ACP153 in cleaved and uncleaved forms. Results of a protein cleavage assay are also depicted. FIG. 24D illustrates the results from a HEK-Blue IL-2 assay using wild-type cytokine, intact fusion protein, and protease-cleaved fusion protein.

[0053] FIGS. 25A and 25B are two graphs showing analysis of ACP16 (FIG. 25A) and ACP124 (FIG. 25B) in a HEKBlue IL-2 reporter assay in the presence of HSA. Circles depict the activity of the uncut polypeptide; squares depict activity of the cut polypeptide. FIG. 25C is a graph showing results of a CTLL-2 proliferation assay. CTLL2 cells (ATCC) were plated in suspension at a concentration of 500,000 cells/well in culture media with or without 40 mg/ml human serum albumin (HSA) and stimulated with a dilution series of activatable hIL2 for 72 hours at 37° C. and 5% CO₂. Activity of uncleaved and cleaved activatable ACP16 was tested. Cleaved activatable hIL2 was generated by incubation with active MMP9. Cell activity was assessed using a CellTiter-Glo (Promega) luminescence-based cell viability assay. Circles depict intact fusion protein, and squares depict protease-cleaved fusion protein.

[0054] FIGS. 26A-26C are a series of graphs showing activity of fusion proteins in an HEKBlue IL-12 reporter assay. FIG. 26A depicts IL-12/STAT4 activation in a comparison of ACP11 (a human p40/murine p35 IL12 fusion protein) to ACP04 (negative control). FIG. 26B is a graph showing analysis of ACP91 (a chimeric IL-12 fusion protein). Squares depict activity of the uncut ACP91 polypeptide, and triangles depict the activity of the cut polypeptide (ACP91+MMP9). EC50 values for each are shown in the table. FIG. 26C is a graph showing analysis of ACP136 (a chimeric IL-12 fusion protein). Squares depict activity of the uncut ACP136 polypeptide, and triangles depict the activity of the cut polypeptide (ACP136+MMP9). EC50 values for each are shown in the table insert.

[0055] FIGS. 27A-27F are a series of graphs showing that cleaved mouse IFNα1 polypeptides ACP31 (FIG. 27A), ACP125 (FIG. 27B), ACP126 (FIG. 27C), ACP127 (FIG. 27D), APC128 (FIG. 27E), and APC129 (FIG. 27F) are active in an B16-Blue IFN-α/β reporter assay.

[0056] FIGS. 28A-28N are a series of graphs depicting the activity of ACP56 (FIG. 28A), ACP57 (FIG. 28B) ACP58 (FIG. 28C), ACP59 (FIG. 28D), ACP60 (FIG. 28E), ACP61+HSA (FIG. 28F), ACP30+HSA (FIG. 28G), ACP73 (FIG. 28H), ACP70+HSA (FIG. 28I), ACP71 (FIG. 28J), ACP72 (FIG. 28K), ACP73 (FIG. 28L), ACP74 (FIG. 28M), and ACP75 (FIG. 28N) in a B16 IFNγ reporter assay. Each fusion was tested for its activity when cut (squares) and uncut (circles).

[0057] FIGS. 29A-29B are two graphs showing results of analyzing ACP31 (mouse IFNα1 fusion protein) and ACP11 (a human p40/murine p35 IL12 fusion protein) in a tumor xenograft model. FIG. 29A shows tumor volume over time in mice treated with 33 μg ACP31 (circles), 110 μg ACP31 (triangles), 330 μg ACP31 (diamonds), and as controls 1 μg murine wild type IFNα1 (dashed line, squares) and 10 μg mIFNα1 (dashed line, small circles). Vehicle alone is indicated by large open circles. The data show tumor volume decreasing over time in a dose-dependent manner in mice treated with ACP31. FIG. 29B shows tumor volume over time in mice treated with 17.5 μg ACP11 (squares), 175 μg ACP11 (triangles), 525 μg ACP11 (circles), and as controls 2 μg ACP04 (dashed line, triangles) and 10 μg ACP04 (dashed line, diamonds). Vehicle alone is indicated by large open circles. The data show tumor volume decreasing over time in a dose-dependent manner in mice treated with both ACP11 and ACP04 (a human p40/murine p35 IL12 fusion protein).

[0058] FIGS. 30A-30F are a series of spaghetti plots showing tumor volume over time in a mouse xenograft tumor model in mice each treated with vehicle alone (FIG. 30A), 2 μg ACP04 (FIG. 30B), 10 μg ACP04 (FIG. 30C), 17.5 μg ACP11 (FIG. 30D), 175 μg ACP11 (FIG. 30E), and 525 μg ACP11 (FIG. 30F). Each line represents a single mouse.

[0059] FIG. 31A-31C are three graphs showing results of analyzing ACP16 and ACP124 in a tumor xenograft model. FIG. 31A shows tumor volume over time in mice treated with 4.4 μg ACP16 (squares), 17 μg ACP16 (triangles), 70 μg ACP16 (downward triangles), 232 μg ACP16 (dark circles), and as a comparator 12 μg wild type IL-2 (dashed line, triangles) and 36 μg wild type IL-2 (dashed line, diamonds. Vehicle alone is indicated by large open circles. The data show tumor volume decreasing over time in a dose-dependent manner in mice treated with ACP16 at higher concentrations. FIG. 31B shows tumor volume over time in mice treated with 17 μg ACP124 (squares), 70 μg ACP124 (triangles), 230 μg ACP124 (downward triangles), and 700 μg ACP124. Vehicle alone is indicated by large open circles. FIG. 31C shows tumor volume over time in mice treated with 17 μg ACP16 (triangles), 70 μg ACP16 (circles), 232 μg ACP16 (dark circles), and as a comparator 17 μg ACP124 (dashed line, triangles) 70 μg ACP124 (dashed line, diamonds), 230 μg ACP124 (dashed line, stars). Vehicle alone is indicated by dark downward triangles. The data show tumor volume decreasing over time in a dose-dependent manner in mice treated with ACP16, but not ACP124.

[0060] FIG. 32A-32B are a series of spaghetti plots showing activity of fusion proteins in an MC38 mouse xenograft model corresponding to the data shown in FIG. 31A-31C. Each line in the plots is a single mouse.

[0061] FIG. 33 is a graph showing tumor volume over time in a mouse xenograft model showing tumor growth in control mice (open circles) and AP16-treated mice (squares).

[0062] FIGS. 34A-34D are a series of survival plots showing survival of mice over time after treatment with cleavable fusion proteins. FIG. 34A shows data for mice treated with vehicle alone (gray line), 17 μg ACP16 (dark line), and 17 μg ACP124 (dashed line). FIG. 34B shows data for mice treated with vehicle alone (gray line), 70 μg ACP16 (dark line), and 70 μg ACP124 (dashed line). FIG. 34C shows data for mice treated with vehicle alone (gray line), 232 μg ACP16 (dark line), and 230 μg ACP124 (dashed line). FIG. 34D shows data for mice treated with vehicle alone (gray line), 232 μg ACP16 (dark line), and 700 μg ACP124 (dashed line).

[0063] FIG. 35 a series of spaghetti plots showing activity of fusion proteins in an MC38 mouse xenograft model. All mouse groups were given four doses total except for the highest three doses of APC132, wherein fatal toxicity was detected after 1 week/2 doses. Shown are vehicle alone (top), 17, 55, 70, and 230 μg ACP16 (top full row), 9, 28, 36, and 119 μg ACP132 (middle full row), and 13, 42, 54, and 177 μg ACP21 (bottom full row). Each line in the plots represents an individual animal.

[0064] FIGS. 36A-36H are a series of graphs showing activity of fusion proteins in the HEK-Blue IFN-α&β reporter assay. FIGS. 36A-36H depict activation of the IFN-α/13 pathway in a comparison of human IFNα fusion protein) to control (human IFNα). Squares depict activity of the uncut IFNα polypeptide (intact) and triangles depict the activity of the cut IFNα polypeptide (cleaved). Circles depict activity of the control (human IFNα). EC50 values for each are shown in the table. Results confirm that the IFNα fusion proteins are active and inducible. FIGS. 36A-36H also depict results of the protein cleavage assay for each IFNα fusion protein. Each IFNα fusion protein was run on an SDS-PAGE gel in both cleaved and uncleaved form. As can be seen in the gel, cleavage was complete.

[0065] FIGS. 37A-37D are a series of graphs showing activity of fusion proteins in the HEK-Blue IFN-α/β reporter assay. FIGS. 37A-37B depict activation of the IFN-α/β pathway in a comparison of a mouse IFNβ fusion protein to control (mouse IFNβ). FIGS. 37C-37D depict activation of the IFN-α/β pathway in a comparison of a human IFNβ fusion protein to control (human IFNβ). Squares depict activity of the uncut IFNβ polypeptide (intact) and triangles depict the activity of the cut IFNβpolypeptide (cleaved). Circles depict activity of the control. EC50 values for each are shown in the table. Results confirm that the IFNβ fusion proteins are active and inducible.

[0066] FIGS. 38A-38C are a series of graphs showing activity of fusion proteins in the human PBMCs assay. FIGS. 38A-38C depict activation of the IFNα pathway in a comparison of human IFNα fusion protein to control (human IFNα). Squares depict activity of the uncut IFNα polypeptide (intact) and triangles depict the activity of the cut IFNα polypeptide (cleaved). Circles depict activity of the control human IFNα. EC50 values for each are shown in the table. Analysis was performed based on quantification of CXCL-10 (IP-10). Results confirm that the IFNα fusion proteins are active and inducible.

[0067] FIGS. 39A-39G show are results of analyzing IFN fusion proteins in syngeneic MC38 mouse tumor model. FIG. 39A shows average tumor volume over time in mice treated with 369 μg WW0610 (square), 553 μg WW0610 (down triangle), 830 μg WW0610 (up triangle), and 1,245 μg WW0610 (circle). Vehicle alone is indicated by a black circle. FIG. 39B shows average tumor volume over time in mice treated with 1,231 μg WW0815 (square), 1,845 μg WW0815 (down triangle), 2,770 μg WW0815 (up triangle), and 4,154 μg WW0815 (circle). Vehicle alone is indicated by a black circle.

[0068] FIG. 39C shows average tumor volume over time in mice treated with 4.6 μg WW0644 (square), 9.3 μg WW0644 (down triangle), 19 μg WW0644 (up triangle), and 37 μg WW0644 (circle). Vehicle alone is indicated by a black circle. FIG. 39D shows average tumor volume over time in mice treated with 31 μg WW0816 (square), 62 μg WW0816 (down triangle), 123 μg WW0816 (up triangle), and 247 μg WW0816 (circle). Vehicle alone is indicated by a black circle. FIG. 39E shows average tumor volume over time in mice treated with 110 μg WW0609 (square), 830 μg WW0609 (down triangle), and 1,320 μg WW0609 (up triangle). FIG. 39F shows average tumor volume over time in mice treated with 110 μg WW0610 (square), 830 μg WW0610 (down triangle), and 1,320 μg WW0610 (up triangle).

[0069] FIG. 39G shows average tumor volume over time in mice treated with 0.3 μg WW0643 (square), 1.5 μg WW0643 (down triangle), 7.5 μg WW0643 (up triangle), and 37.5 μg WW0643 (diamond). Vehicle alone is indicated by a black circle.

[0070] FIG. 40A-40G shows a series of spider plots showing activity of fusion proteins in an MC38 xenograft model corresponding to data in FIGS. 39A-39G. Each line in the plots is the tumor volume over time for a single mouse.

[0071] FIG. 41A-41G show average percent body weight over time in mice treated with the IFN fusion proteins in FIGS. 39A-39G.

[0072] FIGS. 42A-42E shows the results of B16 IFN reporter assays. Inducible interferon constructs of interest were tested before and after cleavage. The relevant wildtype IFN was tested as a control.

[0073] FIG. 43 shows binding data of ACP16, ACP10, ACP11

[0074] FIGS. 44A-44D depict the activity of cytokine fusion proteins constructs ACP243, ACP244, ACP243, ACP244, and ACP247.

[0075] FIG. 45 shows a series of spider plots showing tumor volume over time during treatment with vehicle, IL-12, ACP11 or ACP10.

[0076] FIGS. 46A-46D, 47A-47D, 48A, 48B, 49A-49I, 50A, 50B, and 51A-51C shows data (tumor volume and/or body weight) for mice treated with cytokine fusion proteins constructs.

[0077] FIGS. 52A-52N, 53A, and 53B depict the activity of cytokine fusion proteins constructs.

[0078] FIG. 54A-54N shows the results of proliferation assays comparing cut protein, uncut protein, and IL2 as a control.

[0079] FIGS. 55A-55N shows the results of HekBlue IL2 reporter assays comparing activity of constructs with and without protease cleavage; IL-2 is included as a control.

[0080] FIGS. 56, 57A-57D, 58, 59A-59Z depict the activity of cytokine fusion proteins constructs.

[0081] FIGS. 60A-60G shows a series of spider plots showing the impact of IFN fusion proteins on body weight in an MC38 mouse xenograft model corresponding to the data shown in FIGS. 41A-41G. Each line in the plots is the body weight over time for a single mouse.

[0082] FIGS. 61A-61B are a series of graphs showing activity of fusion proteins in the B16-Blue IFN-α&β reporter assay. FIG. 61A depicts activation of the IFN-α/β pathway for construct WW0609 in the presence and absence of albumin. FIG. 61B depicts activation of the IFN-α&β pathway for construct WW0643 in the presence and absence of albumin. Squares depict activity of the uncut IFNα polypeptide (intact) and triangles depict the activity of the cut IFNα polypeptide (cleaved). Circles depict activity of the control (mouse IFNα). EC50 values for each are shown in the table.

### DETAILED DESCRIPTION

[0083] Disclosed herein are methods and compositions to engineer and use constructs comprising inducible cytokines. Cytokines are potent immune agonists, which lead to them being considered promising therapeutic agents for oncology. However, cytokines proved to have a very narrow therapeutic window. Cytokines have short serum half-lives and are also considered to be highly potent. Consequently, therapeutic administration of cytokines produced undesirable systemic effects and toxicities. These were exacerbated by the need to administer large quantities of cytokine in order to achieve the desired levels of cytokine at the intended site of cytokine action (e.g., a tumor). Unfortunately, due to the biology of cytokines and inability to effectively target and control their activity, cytokines did not achieve the hoped-for clinical advantages in the treatment of tumors.

[0084] Disclosed herein are fusion proteins that overcome the toxicity and short half-life problems that have severely limited the clinical use of cytokines in oncology. The fusion proteins contain cytokine polypeptides that have receptor agonist activity. But in the context of the fusion protein, the cytokine receptor agonist activity is attenuated, and the circulating half-life is extended. The fusion proteins include protease cleave sites, which are cleaved by proteases that are associated with a desired site of cytokine activity (e.g., a tumor), and are typically enriched or selectively present at the site of desired activity. Thus, the fusion proteins are preferentially (or selectively) and efficiently cleaved at the desired site of activity to limit cytokine activity substantially to the desired site of activity, such as the tumor microenvironment. Protease cleavage at the desired site of activity, such as in a tumor microenvironment, releases a form of the cytokine from the fusion protein that is much more active as a cytokine receptor agonist than the fusion protein (typically at least about 100× more active than the fusion protein). The form of the cytokine that is released upon cleavage of the fusion protein typically has a short half-life, which is often substantially similar to the half-life of the naturally occurring cytokine, further restricting cytokine activity to the tumor microenvironment. Even though the half-life of the fusion protein is extended, toxicity is dramatically reduced or eliminated because the circulating fusion protein is attenuated, and active cytokine is targeted to the tumor microenvironment. The fusion proteins described herein, for the first time, enable the administration of an effective therapeutic dose of a cytokine to treat tumors with the activity of the cytokine substantially limited to the tumor microenvironment, and dramatically reduces or eliminates unwanted systemic effects and toxicity of the cytokine.

[0085] The fusion proteins disclosed herein typically comprise a cytokine polypeptide [A], a blocking moiety [D], optionally a half-life extension moiety [H], and a protease-cleavable polypeptide linker. The cytokine polypeptide and the blocking moiety and the optional half-life extension element when present are operably linked by the protease-cleavable polypeptide linker and the fusion polypeptide has attenuated cytokine receptor activating activity, e.g., the cytokine-receptor activating activity of the fusion polypeptide is at least about 10× less than the cytokine receptor activating activity of the polypeptide that contains the cytokine polypeptide that is produced by cleavage of the protease cleavable linker. Some preferred fusion polypeptides are of one of formula (I)-(VI):

[A]-[L1]-[H]-[L2]-[D] (I);

[D]-[L2]-[H]-[L1]-[A] (II);

[A]-[L1]-[D]-[L2]-[H] (III);

[H]-[L2]-[D]-[L1]-[A] (IV);

[H]-[L1]-[A]-[L2′]-[D] (V);

[D]-[L1]-[A]-[L2′]-[H] (VI);

[0086] wherein [A] is a cytokine polypeptide, [D] is a blocking moiety, [H] is a half-life extension moiety, [L1] is a protease-cleavable polypeptide linker, [L2] is an polypeptide linker that is optionally protease-cleavable, and [L2′] is a protease-cleavable polypeptide linker. [L1] and [L2] or [L1] and [L2′] can be have the same or different amino acid sequence and or protease-cleavage site (when L2 is protease-cleavable) as desired.

[0087] This disclosure further relates to pharmaceutical compositions that contain the inducible fusion protein and an additional therapeutic agent, as well as nucleic acids that encode the polypeptides, and recombinant expression vectors and host sells for making such fusion proteins. Also provided herein are methods of using the disclosed fusion proteins in the treatment of diseases, conditions, and disorders.

[0088] Unless otherwise defined, all terms of art, notations and other scientific terminology used herein are intended to have the meanings commonly understood by those of skill in the art to which this invention pertains. In some cases, terms with commonly understood meanings are defined herein for clarity and/or for ready reference, and the inclusion of such definitions herein should not necessarily be construed to represent a difference over what is generally understood in the art. The techniques and procedures described or referenced herein are generally well understood and commonly employed using conventional methodologies by those skilled in the art, such as, for example, the widely utilized molecular cloning methodologies described in Sambrook et al., Molecular Cloning: A Laboratory Manual 4th ed. (2012) Cold Spring Harbor Laboratory Press, Cold Spring Harbor, N.Y. As appropriate, procedures involving the use of commercially available kits and reagents are generally carried out in accordance with manufacturer-defined protocols and conditions unless otherwise noted.

[0089] “Cytokine” is a well-known term of art that refers to any of a class of immunoregulatory proteins (such as interleukin or interferon) that are secreted by cells especially of the immune system and that are modulators of the immune system. Cytokine polypeptides that can be used in the fusion proteins disclosed herein include, but are not limited to transforming growth factors, such as TGF-α and TGF-β (e.g., TGFbeta1, TGFbeta2, TGFbeta3); interferons, such as interferon-α, interferon-β, interferon-γ, interferon-kappa and interferon-omega; interleukins, such as IL-1, IL-1α, IL-2, IL-3, IL-4, IL-5, IL-6, IL-7, IL-8, IL-9, IL-10, IL-11, IL-12, IL-13, IL-14, IL-15, IL-16, IL-17, IL-18, IL-21 and IL-25; tumor necrosis factors, such as tumor necrosis factor alpha and lymphotoxin; chemokines (e.g., C—X—C motif chemokine 10 (CXCL10), CCL19, CCL20, CCL21), and granulocyte macrophage-colony stimulating factor (GM-CS), as well as fragments of such polypeptides that active the cognate receptors for the cytokine (i.e., functional fragments of the foregoing). “Chemokine” is a term of art that refers to any of a family of small cytokines with the ability to induce directed chemotaxis in nearby responsive cells.

[0090] Cytokines are well-known to have short serum half-lives that frequently are only a few minutes or hours. Even forms of cytokines that have altered amino acid sequences intended to extend the serum half-life yet retain receptor agonist activity typically also have short serum half-lives. As used herein, a “short-half-life cytokine” refers to a cytokine that has a substantially brief half-life circulating in the serum of a subject, such as a serum half-life that is less than 10, less than 15, less than 30, less than 60, less than 90, less than 120, less than 240, or less than 480 minutes. As used herein, a short half-life cytokine includes cytokines which have not been modified in their sequence to achieve a longer than usual half-life in the body of a subject and polypeptides that have altered amino acid sequences intended to extend the serum half-life yet retain receptor agonist activity. This latter case is not meant to include the addition of heterologous protein domains, such as a bona fide half-life extension element, such as serum albumin.

[0091] “Sortases” are transpeptidases that modify proteins by recognizing and cleaving a carboxyl-terminal sorting signal embedded in or terminally attached to a target protein or peptide. Sortase A catalyzes the cleavage of the LPXTG motif (SEQ ID NO.: 442) (where X is any standard amino acid) between the Thr and Gly residue on the target protein, with transient attachment of the Thr residue to the active site Cys residue on the enzyme, forming an enzyme-thioacyl intermediate. To complete transpeptidation and create the peptide-monomer conjugate, a biomolecule with an N-terminal nucleophilic group, typically an oligoglycine motif, attacks the intermediate, displacing Sortase A and joining the two molecules.

[0092] As used herein, the term “steric blocker” refers to a polypeptide or polypeptide moiety that can be covalently bonded to a cytokine polypeptide directly or indirectly through other moieties such as linkers, for example in the form of a chimeric polypeptide (fusion protein), but otherwise does not covalently bond to the cytokine polypeptide. A steric blocker can non-covalently bond to the cytokine polypeptide, for example though electrostatic, hydrophobic, ionic or hydrogen bonding. A steric blocker typically inhibits or blocks the activity of the cytokine moiety due to its proximity to the cytokine moiety and comparative size. A steric blocker may also block by virtue of recruitment of a large protein binding partner. An example of this is an antibody which binds to serum albumin; while the antibody itself may or may not be large enough to block activation or binding on its own, recruitment of albumin allows for sufficient steric blocking.

[0093] As used and described herein, a “half-life extension element” is a part of the chimeric polypeptide that increases the serum half-life and improve pK, for example, by altering its size (e.g., to be above the kidney filtration cutoff), shape, hydrodynamic radius, charge, or parameters of absorption, biodistribution, metabolism, and elimination.

[0094] As used herein, the terms “activatable,” “activate,” “induce,” and “inducible” refer to the ability of a protein, i.e. a cytokine, that is part of a fusion protein, to bind its receptor and effectuate activity upon cleavage of additional elements from the fusion protein.

[0095] As used herein, “plasmids” or “viral vectors” are agents that transport the disclosed nucleic acids into the cell without degradation and include a promoter yielding expression of the nucleic acid molecule and/or polypeptide in the cells into which it is delivered.

[0096] As used herein, the terms “peptide”, “polypeptide”, or “protein” are used broadly to mean two or more amino acids linked by a peptide bond. Protein, peptide, and polypeptide are also used herein interchangeably to refer to amino acid sequences. It should be recognized that the term polypeptide is not used herein to suggest a particular size or number of amino acids comprising the molecule and that a peptide of the invention can contain up to several amino acid residues or more.

[0097] As used throughout, “subject” can be a vertebrate, more specifically a mammal (e.g. a human, horse, cat, dog, cow, pig, sheep, goat, mouse, rabbit, rat, and guinea pig), birds, reptiles, amphibians, fish, and any other animal. The term does not denote a particular age or sex. Thus, adult and newborn subjects, whether male or female, are intended to be covered.

[0098] As used herein, “patient” or “subject” may be used interchangeably and can refer to a subject with a disease or disorder (e.g. cancer). The term patient or subject includes human and veterinary subjects.

[0099] As used herein the terms “treatment”, “treat”, or “treating” refers to a method of reducing the effects of a disease or condition or symptom of the disease or condition. Thus, in the disclosed method, treatment can refer to at least about 10%, at least about 20%, at least about 30%, at least about 40%, at least about 50%, at least about 60%, at least about 70%, at least about 80%, at least about 90%, or substantially complete reduction in the severity of an established disease or condition or symptom of the disease or condition. For example, a method for treating a disease is considered to be a treatment if there is a 10% reduction in one or more symptoms of the disease in a subject as compared to a control. Thus, the reduction can be a 10%, 20%, 30%, 40%, 50%, 60%, 70%, 80%, 90%, 100%, or any percent reduction in between 10% and 100% as compared to native or control levels. It is understood that treatment does not necessarily refer to a cure or complete ablation of the disease, condition, or symptoms of the disease or condition.

[0100] As used herein, the terms “prevent”, “preventing”, and “prevention” of a disease or disorder refers to an action, for example, administration of the chimeric polypeptide or nucleic acid sequence encoding the chimeric polypeptide, that occurs before or at about the same time a subject begins to show one or more symptoms of the disease or disorder, which inhibits or delays onset or exacerbation of one or more symptoms of the disease or disorder.

[0101] As used herein, references to “decreasing”, “reducing”, or “inhibiting” include a change of at least about 10%, of at least about 20%, of at least about 30%, of at least about 40%, of at least about 50%, of at least about 60%, of at least about 70%, of at least about 80%, of at least about 90% or greater as compared to a suitable control level. Such terms can include but do not necessarily include complete elimination of a function or property, such as agonist activity.

[0102] An “attenuated cytokine receptor agonist” is a cytokine receptor agonist that has decreased receptor agonist activity as compared to the cytokine receptor's naturally occurring agonist. An attenuated cytokine agonist may have at least about 10×, at least about 50×, at least about 100×, at least about 250×, at least about 500×, at least about 1000× or less agonist activity as compared to the receptor's naturally occurring agonist. When a fusion protein that contains a cytokine polypeptide as described herein is described as “attenuated” or having “attenuated activity”, it is meant that the fusion protein is an attenuated cytokine receptor agonist.

[0103] An “intact fusion protein” is a fusion protein in which no domain has been removed, for example by protease cleavage. A domain may be removable by protease cleavage or other enzymatic activity, but when the fusion protein is “intact”, this has not occurred.

[0104] As used herein “moiety” refers to a portion of a molecule that has a distinct function within that molecule, and that function may be performed by that moiety in the context of another molecule. A moiety may be a chemical entity with a particular function, or a portion of a biological molecule with a particular function. For example, a “blocking moiety” within a fusion protein is a portion of the fusion protein which is capable of blocking the activity of some or all of the fusion polypeptide. This may be a protein domain, such as serum albumin. Blocking may be accomplished by a steric blocker or a specific blocker. A steric blocker blocks by virtue of size and position and not based upon specific binding; an examples is serum albumin. A specific blocker blocks by virtue of specific interactions with the moiety to be blocked. A specific blocker must be tailored to the particular cytokine or active domain; a steric blocker can be used regardless of the payload, as long as it is large enough. If desired a blocking moiety that is incorporated into a fusion proteins described herein can associate with another polypeptide to create a specific binding domain. For example, if a cytokine binding fragment of an antibody is used as the blocking moiety, the fusion polypeptide can include an scFv that is specific for the cytokine as the blocking moiety or the fusion polypeptide can comprise half of a Fab, for example VH-CH1 or VL-CL as the blocking moiety, which can associate with a complementary chain VL-CL or VH-CH1, respectively, to form an Fab fragment that specifically binds the cytokine. As further described herein, the blocking moiety may block activity of the fusion protein directly or when the blocking moiety associates with another polypeptide. For example, when an anti-HSA scFv binds HSA or when a VH-CH1 polypeptide associates with a complementary VL-CL polypeptide and then binds the cytokine polypeptide.

[0105] In general, the therapeutic use of cytokines is strongly limited by their systemic toxicity. TNF, for example, was originally discovered for its capacity of inducing the hemorrhagic necrosis of some tumors, and for its in vitro cytotoxic effect on different tumoral lines, but it subsequently proved to have strong pro-inflammatory activity, which can, in case of overproduction conditions, dangerously affect the human body. As the systemic toxicity is a fundamental problem with the use of pharmacologically active amounts of cytokines in humans, novel derivatives and therapeutic strategies are now under evaluation, aimed at reducing the toxic effects of this class of biological effectors while keeping their therapeutic efficacy.

[0106] IL-2 exerts both stimulatory and regulatory functions in the immune system and is, along with other members of the common γchain (γc) cytokine family, central to immune homeostasis. IL-2 mediates its action by binding to IL-2 receptors (IL-2R), consisting of either trimeric receptors made of IL-2Rα (CD25), IL-2Rβ (CD122), and IL-2R7 (γc, CD132) chains or dimeric βγ IL-2Rs (1, 3). Both IL-2R variants are able to transmit signal upon IL-2 binding. However, trimeric αβγ IL-2Rs have a roughly 10-100 times higher affinity for IL-2 than dimeric βγ IL-2Rs (3), implicating that CD25 confers high-affinity binding of IL-2 to its receptor but is not crucial for signal transduction. Trimeric IL-2Rs are found on activated T cells and CD4+ forkhead box P3 (FoxP3)+T regulatory cells (Treg), which are sensitive to IL-2 in vitro and in vivo. Conversely, antigen-experienced (memory) CD8+, CD44 high memory-phenotype (MP) CD8+, and natural killer (NK) cells are endowed with high levels of dimeric fry IL-2Rs, and these cells also respond vigorously to IL-2 in vitro and in vivo.

[0107] Expression of the high-affinity IL-2R is critical for endowing T cells to respond to low concentrations of IL-2 that is transiently available in vivo. IL-2Rα expression is absent on naive and memory T cells but is induced after antigen activation. IL-2R3 is constitutively expressed by NK, NKT, and memory CD8+ T cells but is also induced on naive T cells after antigen activation. γc is much less stringently regulated and is constitutively expressed by all lymphoid cells. Once the high-affinity IL-2R is induced by antigen, IL-2R signaling upregulates the expression of IL-2Rα in part through Stat5-dependent regulation of Il2ra transcription (Kim et al., 2001). This process represents a mechanism to maintain expression of the high-affinity IL-2R and sustain IL-2 signaling while there remains a source of IL-2.

[0108] IL-2 is captured by IL-2Rα through a large hydrophobic binding surface surrounded by a polar periphery that results in a relatively weak interaction (Kd 10-8 M) with rapid on-off binding kinetics. However, the IL-2Ra-IL-2 binary complex leads to a very small conformational change in IL-2 that promotes association with IL-2R3 through a distinct polar interaction between IL-2 and IL-2Rβ. The pseudo-high affinity of the IL2/α/β trimeric complex (i.e. Kd ˜300 pM) clearly indicates that the trimeric complex is more stable than either IL2 bound to the α chain alone (Kd=10 nM) or to the β chain alone (Kd=450 nM) as shown by Ciardelli's data. In any event, the IL2/α/β trimer then recruits the γchain into the quaternary complex capable of signaling, which is facilitated by the large composite binding site on the IL2-bound β chain for the γchain.

[0109] In other words, the ternary IL-2Rα-IL-2R8-IL-2 complex then recruits γc through a weak interaction with IL-2 and a stronger interaction with IL-2Rβ to produce a stable quaternary high-affinity IL-2R (Kd 10-11 M which is 10 pM). The formation of the high-affinity quaternary IL-2-IL-2R complex leads to signal transduction through the tyrosine kinases Jak1 and Jak3, which are associated with IL-2Rβ and γc, respectively (Nelson and Willerford, 1998). The quaternary IL-2-IL-2R complex is rapidly internalized, where IL-2, IL-2R8, and γc are rapidly degraded, but IL-2Rα is recycled to the cell surface (Hemar et al., 1995; Yu and Malek, 2001). Thus, those functional activities that require sustained IL-2R signaling require a continued source of IL-2 to engage IL-2Rα and form additional IL-2-IL-2R signaling complexes.

[0110] Interleukin-15 (IL-15), another member of the 4-alpha-helix bundle family of cytokines, has also emerged as an immunomodulator for the treatment of cancer. IL-15 is initially captured via IL-1SRα, which is expressed on antigen-presenting dendritic cells, monocytes and macrophages. IL-15 exhibits broad activity and induces the differentiation and proliferation of T, B and natural killer (NK) cells via signaling through the IL-15/IL-2-R-β (CD122) and the common γchain (CD132). It also enhances cytolytic activity of CD8+ T cells and induces long-lasting antigen-experienced CD8′CD44 memory T cells. IL-15 stimulates differentiation and immunoglobulin synthesis by B cells and induces maturation of dendritic cells. It does not stimulate immunosuppressive T regulatory cells (Tregs). Thus, boosting IL-15 activity selectively in the tumor micro-environment could enhance innate and specific immunity and fight tumors (Waldmann et al., 2012). IL-1S was initially identified for its ability to stimulate T cell proliferation in an IL-2-like manner through common receptor components (IL-2R/15R8-γc) and signaling through JAK1/JAK3 and STAT3/STAT5. Like IL-2, IL-15 has been shown to stimulate proliferation of activated CD4-CD8-, CD4+CD8+, CD4+ and CD8+ T cells as well as facilitate the induction of cytotoxic T-lymphocytes, and the generation, proliferation and activation of NK cells (Waldmann et al., 1999). However, unlike IL-2 which is required to maintain forkhead box P3 (FOXP3)-expressing CD4+CD25+ Treg cells and for the retention of these cells in the periphery, IL-15 has little effect on Tregs (Berger et al., 2009). This is important as FOXP3-expressing CD4+CD25+ Tregs inhibit effector T cells, thereby inhibiting immune responses including those directed against the tumor. IL-2 also has a crucial role in initiating activation induced cell death (AICD), a process that leads to the elimination of self-reactive T cells, whereas IL-15 is an anti-apoptotic factor for T cells (Marks-Konczalik et al., 2000). IL-15 co-delivered with HIV peptide vaccines has been shown to overcome CD4+ T cell deficiency by promoting longevity of antigen-specific CD8+ T cells and blocking TRAIL-mediated apoptosis (Oh et al., 2008). Furthermore, IL-15 promotes the long-term maintenance of CD8+CD44hi memory T cells (Kanegane et al., 1996).

[0111] The importance of IL-15 and IL-15Rα to T and NK cell development is further highlighted by the phenotype of IL-15Rα^{-/-} and IL-15^{-/-} mice. Knockout mice demonstrate decreased numbers of total CD8+ T cells, and are deficient in memory-phenotype CD8+ T cells, NK cells, NK/T cells and some subsets of intestinal intraepithelial lymphocytes, indicating that IL-15 provides essential positive homeostatic functions for these subsets of cells (Lodolce et al., 1996; Kennedy et al., 1998). The similarities in the phenotypes of these two strains of knockout mice suggest the importance of IL-15Rα in maintaining physiologically relevant IL-15 signals.

[0112] IL-1S is presented in trans by the IL-15 receptor alpha-chain to the IL-15Rβγc complex displayed on the surface of T cells and natural killer (NK) cells (Han et al., 2011). The IL-15Rα-chain plays a role of chaperone protein, stabilizes, and increases IL-15 activity (Desbois et al., 2016). It has been shown that exogenous IL-15 may have a limited impact on patients with cancer due to its dependency on IL-15Rα frequently downregulated in cancer patients. Therefore, the fusion protein RLI, composed of the sushi+ domain of IL15Rα coupled via a linker to IL-15, has been suggested as an alternative approach to IL15 therapy (Bessard et al., 2009). It was found that administration of soluble IL-15/IL-15Rα complexes greatly enhanced IL-15 serum half-life and bioavailability in vivo (Stoklasek et al., 2010).

[0113] In addition to the effects on T and NK cells, IL-15 also has several effects on other components of the immune system. IL-15 protects neutrophils from apoptosis, modulates phagocytosis and stimulates the secretion of IL-8 and IL-1R antagonist. It functions through the activation of JAK2, p38 and ERK1/2 MAPK, Syk kinase and the NF-kB transcriptional factor (Pelletier et al., 2002). In mast cells, IL-15 can act as a growth factor and an inhibitor of apoptosis. In these cells IL-15 activates the JAK2/STAT5 pathway without the requirement of γc binding (Tagaya et al., 1996). IL-15 also induces B lymphocyte proliferation and differentiation, and increases immunoglobulin secretion (Armitage et al., 1995). It also prevents Fas-mediated apoptosis and allows induction of antibody responses partially independent of CD4-help (Demerci et al., 2004; Steel et al., 2010). Monocytes, macrophages and dendritic cells effectively transcribe and translate IL-15. They also respond to IL-15 stimulation. Macrophages respond by increasing phagocytosis, inducing IL-8, IL-12 and MCP-1 expression, and secreting IL-6, IL-8 and TNF a (Budagian et al., 2006). Dendritic cells incubated with IL-15 demonstrate maturation with increased CD83, CD86, CD40, and MHC class II expression, are also resistant to apoptosis, and show enhanced interferon-γ secretion (Anguille et al., 2009).

[0114] IL-15 has also been shown to have effects on non-hematological cells including myocytes, adipocytes, endothelial and neural cells. IL-15 has an anabolic effect on muscle and may support muscle cell differentiation (Quinn et al., 1995). It stimulates myocytes and muscle fibers to accumulate contractile protein and is able to slow muscle wasting in rats with cancer-related cachexia (Figueras et al., 2004). IL-1S has also been shown to stimulate angiogenesis (Angiolillo et al., 1997) and induce microglial growth and survival (Hanisch et al., 1997).

[0115] Interleukin-7 (IL-7), also of the IL-2/IL-15 family, is a well-characterized pleiotropic cytokine, and is expressed by stromal cells, epithelial cells, endothelial cells, fibroblasts, smooth muscle cells and keratinocytes, and following activation, by dendritic cells (Alpdogan et al., 2005). Although it was originally described as a growth and differentiation factor for precursor B lymphocytes, subsequent studies have shown that IL-7 is critically involved in T-lymphocyte development and differentiation. Interleukin-7 signaling is essential for optimal CD8 T-cell function, homeostasis and establishment of memory (Schluns et al., 2000); it is required for the survival of most T-cell subsets, and its expression has been proposed to be important for regulating T-cell numbers.

[0116] IL-7 binds to a dimeric receptor, including IL-7Rα and γ_{c} to form a ternary complex that plays fundamental roles in extracellular matrix remodeling, development, and homeostasis of T and B cells (Mazzucchelli and Durum, 2007). IL-7Rα also cross-reacts to form a ternary complex with thymic stromal lymphopoietin (TSLP) and its receptor (TSLPR), and activates the TSLP pathway, resulting in T and dendritic cell proliferation in humans and further B cell development in mice (Leonard, 2002). Tight regulation of the signaling cascades activated by the complexes are therefore crucial to normal cellular function. Under-stimulation of the IL-7 pathway caused by mutations in the IL-7Rα ectodomain inhibits T and B cell development, resulting in patients with a form of severe combined immunodeficiency (SCID) (Giliani et al., 2005; Puel et al., 1998).

[0117] IL-7 has a potential role in enhancing immune reconstitution in cancer patients following cytotoxic chemotherapy. IL-7 therapy enhances immune reconstitution and can augment even limited thymic function by facilitating peripheral expansion of even small numbers of recent thymic emigrants. Therefore, IL-7 therapy could potentially repair the immune system of patients who have been depleted by cytotoxic chemotherapy (Capitini et al., 2010).

[0118] Interleukin-12 (IL-12) is a disulfide-linked heterodimer of two separately encoded subunits (p35 and p40), which are linked covalently to give rise to the so-called bioactive heterodimeric (p70) molecule (Lieschke et al., 1997; Jana et al., 2014). Apart from forming heterodimers (IL-12 and IL-23), the p40 subunit is also secreted as a monomer (p40) and a homodimer (p40₂). It is known in the art that synthesis of the heterodimer as a single chain with a linker connecting the p35 to the p40 subunit preserves the full biological activity of the heterodimer. IL-12 plays a critical role in the early inflammatory response to infection and in the generation of Th1 cells, which favor cell-mediated immunity. It has been found that overproduction of IL-12 can be dangerous to the host because it is involved in the pathogenesis of a number of autoimmune inflammatory diseases (e.g. MS, arthritis, type 1 diabetes).

[0119] The IL-12 receptor (IL-12R) is a heterodimeric complex consisting of IL-12Rβ1 and IL-12R32 chains expressed on the surface of activated T-cells and natural killer cells (Trinchieri et al., 2003). The IL-12R31 chain binds to the IL-12p40 subunit, whereas IL-12p35 in association with IL-12R32 confers an intracellular signaling ability (Benson et al., 2011). Signal transduction through IL-12R induces phosphorylation of Janus kinase (Jak2) and tyrosine kinase (Tyk2), that phosphorylate and activate signal transducer and activator of transcription (STAT)1, STAT3, STAT4, and STAT5. The specific cellular effects of IL-12 are due mainly to activation of STAT4. IL-12 induces natural killer and T-cells to produce cytokines, in particular interferon (IFN)γ, that mediate many of the proinflammatory activities of IL-12, including CD4+ T-cell differentiation toward the Th1 phenotype (Montepaone et al., 2014).

[0120] Regulatory T cells actively suppress activation of the immune system and prevent pathological self-reactivity and consequent autoimmune disease. Developing drugs and methods to selectively activate regulatory T cells for the treatment of autoimmune disease is the subject of intense research and, until the development of the present invention, which can selectively deliver active interleukins at the site of inflammation, has been largely unsuccessful. Regulatory T cells (Treg) are a class of CD4+CD25+ T cells that suppress the activity of other immune cells. Treg are central to immune system homeostasis, and play a major role in maintaining tolerance to self-antigens and in modulating the immune response to foreign antigens. Multiple autoimmune and inflammatory diseases, including Type 1 Diabetes (T1D), Systemic Lupus Erythematosus (SLE), and Graft-versus-Host Disease (GVHD) have been shown to have a deficiency of Treg cell numbers or Treg function.

[0121] Consequently, there is great interest in the development of therapies that boost the numbers and/or function of Treg cells. One treatment approach for autoimmune diseases being investigated is the transplantation of autologous, ex vivo-expanded Treg cells (Tang, Q., et al, 2013, Cold Spring Harb. Perspect. Med., 3:1-15). While this approach has shown promise in treating animal models of disease and in several early stage human clinical trials, it requires personalized treatment with the patient's own T cells, is invasive, and is technically complex. Another approach is treatment with low dose Interleukin-2 (IL-2). Treg cells characteristically express high constitutive levels of the high affinity IL-2 receptor, IL2Rαβγ, which is composed of the subunits IL2Rα (CD25), IL2R0 (CD122), and IL2R7 (CD132), and Treg cell growth has been shown to be dependent on IL-2 (Malek, T. R., et al., 2010, Immunity, 33:153-65).

[0122] Conversely, immune activation has also been achieved using IL-2, and recombinant IL-2 (Proleukin®) has been approved to treat certain cancers. High-dose IL-2 is used for the treatment of patients with metastatic melanoma and metastatic renal cell carcinoma with a long-term impact on overall survival.

[0123] Clinical trials of low-dose IL-2 treatment of chronic GVHD (Koreth, J., et al., 2011, N Engl J Med., 365:2055-66) and HCV-associated autoimmune vasculitis patients (Saadoun, D., et al., 2011, N Engl J Med., 365:2067-77) have demonstrated increased Treg levels and signs of clinical efficacy. New clinical trials investigating the efficacy of IL-2 in multiple other autoimmune and inflammatory diseases have been initiated. The rationale for using so-called low dose IL-2 was to exploit the high IL-2 affinity of the trimeric IL-2 receptor which is constitutively expressed on Tregs while leaving other T cells which do not express the high affinity receptor in the inactivated state. Aldesleukin (marketed as Proleukin® by Prometheus Laboratories, San Diego, Calif.), the recombinant form of IL-2 used in these trials, is associated with high toxicity. Aldesleukin, at high doses, is approved for the treatment of metastatic melanoma and metastatic renal cancer, but its side effects are so severe that its use is only recommended in a hospital setting with access to intensive care (Web address: www.proleukin.com/assets/pdf/proleukin.pdf).

[0124] The clinical trials of IL-2 in autoimmune diseases have employed lower doses of IL-2 in order to target Treg cells, because Treg cells respond to lower concentrations of IL-2 than many other immune cell types due to their expression of IL2R alpha (Klatzmann D, 2015 Nat Rev Immunol. 15:283-94). However, even these lower doses resulted in safety and tolerability issues, and the treatments used have employed daily subcutaneous injections, either chronically or in intermittent 5-day treatment courses. Therefore, there is a need for an autoimmune disease therapy that potentiates Treg cell numbers and function, that targets Treg cells more specifically than IL-2, that is safer and more tolerable, and that is administered less frequently.

[0125] One approach that has been suggested for improving the therapeutic index of IL-2-based therapy for autoimmune diseases is to use variants of IL-2 that are selective for Treg cells relative to other immune cells. IL-2 receptors are expressed on a variety of different immune cell types, including T cells, NK cells, eosinophils, and monocytes, and this broad expression pattern likely contributes to its pleiotropic effect on the immune system and high systemic toxicity. In particular, activated T effector cells express IL2Rαβγ, as do pulmonary epithelial cells. But, activating T effector cells runs directly counter to the goal of down-modulating and controlling an immune response, and activating pulmonary epithelial cells leads to known dose-limiting side effects of IL-2 including pulmonary edema. In fact, the major side effect of high-dose IL-2 immunotherapy is vascular leak syndrome (VLS), which leads to accumulation of intravascular fluid in organs such as lungs and liver with subsequent pulmonary edema and liver cell damage. There is no treatment of VLS other than withdrawal of IL-2. Low-dose IL-2 regimens have been tested in patients to avoid VLS, however, at the expense of suboptimal therapeutic results.

[0126] According to the literature, VLS is believed to be caused by the release of proinflammatory cytokines from IL-2-activated NK cells. However, there is some evidence that pulmonary edema results from direct binding of IL-2 to lung endothelial cells, which expressed low to intermediate levels of functional αβγ IL-2Rs. And, the pulmonary edema associated with interaction of IL-2 with lung endothelial cells was abrogated by blocking binding to CD25 with an anti-CD25 monoclonal antibody (mAb), in CD25-deficient host mice, or by the use of CD122-specific IL-2/anti-IL-2 mAb (IL-2/mAb) complexes, thus preventing VLS.

[0127] Treatment with interleukin cytokines other than IL-2 has been more limited. IL-15 displays immune cell stimulatory activity similar to that of IL-2 but without the same inhibitory effects, thus making it a promising immunotherapeutic candidate. Clinical trials of recombinant human IL-15 for the treatment of metastatic malignant melanoma or renal cell cancer demonstrated appreciable changes in immune cell distribution, proliferation, and activation and suggested potential antitumor activity (Conlon et. al., 2014). IL-15 is currently in clinical trials to treat various forms of cancer. However, IL-15 therapy is known to be associated with undesired and toxic effects, such as exacerbating certain leukemias, graft-versus-host disease, hypotension, thrombocytopenia, and liver injury. (Mishra A., et al., Cancer Cell, 2012, 22(5):645-55; Alpdogan O. et al., Blood, 2005, 105(2):866-73; Conlon K C et al., J Clin Oncol, 2015, 33(1):74-82.)

[0128] IL-7 promotes lymphocyte development in the thymus and maintains survival of naive and memory T cell homeostasis in the periphery. Moreover, it is important for the organogenesis of lymph nodes (LN) and for the maintenance of activated T cells recruited into the secondary lymphoid organs (SLOs) (Gao et. al., 2015). In clinical trials of IL-7, patients receiving IL-7 showed increases in both CD4+ and CD8+ T cells, with no significant increase in regulatory T cell numbers as monitored by FoxP3 expression (Sportes et al., 2008). In clinical trials reported in 2006, 2008 and 2010, patients with different kinds of cancers such as metastatic melanoma or sarcoma were injected subcutaneously with different doses of IL-7. Little toxicity was seen except for transient fevers and mild erythema. Circulating levels of both CD4+ and CD8+ T cells increased significantly and the number of Treg reduced. TCR repertoire diversity increased after IL-7 therapy. However, the anti-tumor activity of IL-7 was not well evaluated (Gao et. al., 2015). Results suggest that IL-7 therapy could enhance and broaden immune responses.

[0129] IL-12 is a pleiotropic cytokine, the actions of which create an interconnection between the innate and adaptive immunity. IL-12 was first described as a factor secreted from PMA-induced EBV-transformed B-cell lines. Based on its actions, IL-12 has been designated as cytotoxic lymphocyte maturation factor and natural killer cell stimulatory factor. Due to bridging the innate and adaptive immunity and potently stimulating the production of IFNγ, a cytokine coordinating natural mechanisms of anticancer defense, IL-12 seemed ideal candidate for tumor immunotherapy in humans. However, severe side effects associated with systemic administration of IL-12 in clinical investigations and the very narrow therapeutic index of this cytokine markedly tempered enthusiasm for the use of this cytokine in cancer patients (Lasek et. al., 2014). Approaches to IL-12 therapy in which delivery of the cytokine is tumor-targeted, which may diminish some of the previous issues with IL-12 therapy, are currently in clinical trials for cancers.

[0130] The direct use of IL-2 as an agonist to bind the IL-2R and modulate immune responses therapeutically has been problematic due its well-documented therapeutic risks, e.g., its short serum half-life and high toxicity. These risks have also limited the therapeutic development and use of other cytokines. New forms of cytokines that reduce these risks are needed. Disclosed herein are compositions and methods comprising IL-2 and IL-15 and other cytokines, functional fragments and muteins of cytokines, variants, and subunits of cytokines as well as conditionally active cytokines designed to address these risks and provide needed immunomodulatory therapeutics.

[0131] The present invention is designed to address the shortcomings of direct IL-2 therapy and therapy using other cytokines, for example using cytokine blocking moieties, e.g. steric blocking polypeptides, serum half-life extending polypeptides, targeting polypeptides, linking polypeptides, including protease cleavable linkers, and combinations thereof. Cytokines, including interleukins (e.g., IL-2, IL-7, IL-12, IL-15, IL-18, IL-21 IL-23), interferons (IFNs, including IFNalpha, IFNbeta and IFNgamma), tumor necrosis factors (e.g., TNFalpha, lymphotoxin), transforming growth factors (e.g., TGFbeta1, TGFbeta2, TGFbeta3), chemokines (C—X—C motif chemokine 10 (CXCL10), CCL19, CCL20, CCL21), and granulocyte macrophage-colony stimulating factor (GM-CS) are highly potent when administered to patients. As used herein, “chemokine” means a family of small cytokines with the ability to induce directed chemotaxis in nearby responsive cells Cytokines can provide powerful therapy, but are accompanied by undesired effects that are difficult to control clinically and which have limited the clinical use of cytokines. This disclosure relates to new forms of cytokines that can be used in patients with reduced or eliminated undesired effects. In particular, this disclosure relates to pharmaceutical compositions including chimeric polypeptides (fusion proteins), nucleic acids encoding fusion proteins and pharmaceutical formulations of the foregoing that contain cytokines or active fragments or muteins of cytokines that have decreased cytokine receptor activating activity in comparison to the corresponding cytokine. However, under selected conditions or in a selected biological environment the chimeric polypeptides activate their cognate receptors, often with the same or higher potency as the corresponding naturally occurring cytokine. As described herein, this is typically achieved using a cytokine blocking moiety that blocks or inhibits the receptor activating function of the cytokine, active fragment or mutein thereof under general conditions but not under selected conditions, such as those present at the desired site of cytokine activity (e.g., an inflammatory site or a tumor).

[0132] The chimeric polypeptides and nucleic acids encoding the chimeric polypeptides can be made using any suitable method. For example, nucleic acids encoding a chimeric polypeptide can be made using recombinant DNA techniques, synthetic chemistry or combinations of these techniques, and expressed in a suitable expression system, such as in CHO cells. Chimeric polypeptides can similarly be made, for example by expression of a suitable nucleic acid, using synthetic or semi-synthetic chemical techniques, and the like. In some embodiments, the blocking moiety can be attached to the cytokine polypeptide via sortase-mediated conjugation. “Sortases” are transpeptidases that modify proteins by recognizing and cleaving a carboxyl-terminal sorting signal embedded in or terminally attached to a target protein or peptide. Sortase A catalyzes the cleavage of the LPXTG motif (SEQ ID No.: 442) (where X is any standard amino acid) between the Thr and Gly residue on the target protein, with transient attachment of the Thr residue to the active site Cys residue on the enzyme, forming an enzyme-thioacyl intermediate. To complete transpeptidation and create the peptide-monomer conjugate, a biomolecule with an N-terminal nucleophilic group, typically an oligoglycine motif, attacks the intermediate, displacing Sortase A and joining the two molecules.

[0133] To form the cytokine-blocking moiety fusion protein, the cytokine polypeptide is first tagged at the N-terminus with a polyglycine sequence, or alternatively, with at the C-terminus with a LPXTG motif (SEQ ID NO.: 442). The blocking moiety or other element has respective peptides attached that serve as acceptor sites for the tagged polypeptides. For conjugation to domains carrying a LPXTG (SEQ ID NO.: 442) acceptor peptide attached via its N-terminus, the polypeptide will be tagged with an N-terminal poly-glycine stretch. For conjugation to domain carrying a poly-glycine peptide attached via its C-terminus, the polypeptide will be tagged at its C-terminus with a LPXTG (SEQ ID NO.: 442) sortase recognition sequence. Recognizing poly-glycine and LPXTG (SEQ ID NO.: 442) sequences, sortase will form a peptide bond between polymer-peptide and tagged polypeptides. The sortase reaction cleaves off glycine residues as intermediates and occurs at room temperature.

[0134] A variety of mechanisms can be exploited to remove or reduce the inhibition caused by the blocking moiety. For example, the pharmaceutical compositions can include a cytokine moiety and a blocking moiety, e.g. a steric blocking moiety, with a protease cleavable linker comprising a protease cleavage site located between the cytokine and cytokine blocking moiety or within the cytokine blocking moiety. When the protease cleavage site is cleaved, the blocking moiety can dissociate from cytokine, and the cytokine can then activate cytokine receptor. A cytokine moiety can also be blocked by a specific blocking moiety, such as an antibody, which binds an epitope found on the relevant cytokine.

[0135] Any suitable linker can be used. For example, the linker can comprise glycine-glycine, a sortase-recognition motif, or a sortase-recognition motif and a peptide sequence (Gly₄Ser)ₙ (SEQ ID NO.: 443) or (Gly₃Ser)ₙ, (SEQ ID NO.: 444) wherein n is 1, 2, 3, 4 or 5. Typically, the sortase-recognition motif comprises a peptide sequence LPXTG (SEQ ID NO.: 442), where X is any amino acid. In some embodiments, the covalent linkage is between a reactive lysine residue attached to the C-terminal of the cytokine polypeptide and a reactive aspartic acid attached to the N-terminal of the blocker or other domain. In other embodiments, the covalent linkage is between a reactive aspartic acid residue attached to the N-terminal of the cytokine polypeptide and a reactive lysine residue attached to the C-terminal of said blocker or other domain.

[0136] Accordingly, as described in detail herein, the cytokine blocking moieties used can be steric blockers. As used herein, a “steric blocker” refers to a polypeptide or polypeptide moiety that can be covalently bonded to a cytokine polypeptide directly or indirectly through other moieties such as linkers, for example in the form of a chimeric polypeptide (fusion protein), but otherwise does not covalently bond to the cytokine polypeptide. A steric blocker can non-covalently bond to the cytokine polypeptide, for example though electrostatic, hydrophobic, ionic or hydrogen bonding. A steric blocker typically inhibits or blocks the activity of the cytokine moiety due to its proximity to the cytokine moiety and comparative size. The steric inhibition of the cytokine moiety can be removed by spatially separating the cytokine moiety from the steric blocker, such as by enzymatically cleaving a fusion protein that contains a steric blocker and a cytokine polypeptide at a site between the steric blocker and the cytokine polypeptide.

[0137] As described in greater detail herein, the blocking function can be combined with or due to the presence of additional functional components in the pharmaceutical composition, such as a targeting domain, a serum half-life extension element, and protease-cleavable linking polypeptides. For example, a serum half-life extending polypeptide can also be a steric blocker.

[0138] In the interest of presenting a concise disclosure of the full scope of the invention, aspects of the invention are described in detail using the cytokine IL-2 as an exemplary cytokine. However, the invention and this disclosure are not limited to IL-2. It will be clear to a person of skill in the art that this disclosure, including the disclosed methods, polypeptides and nucleic acids, adequately describes and enables the use of other cytokines, fragments, variants, cytokine subunits, and muteins, such as IL-2, IL-7, IL-12, IL-15, IL-18, IL-21 IL-23, IFNalpha, IFNbeta, IFNgamma, TNFalpha, lymphotoxin, TGF-beta1, TGFbeta2, TGFbeta3, GM-CSF, CXCL10, CCL19, CCL20, CCL21 and functional fragments or muteins of any of the foregoing. Preferred cytokines for use in the fusion proteins disclosed herein are IL-2, IL-12, IFNalpha, IFNbeta, IFNgamma, muteins, functional variants, and functional fragments, or subunits of any of the foregoing. For example, the cytokine a IL-12 cytokine may be a p35 subunit, a p40 subunit, a heterodimer.

[0139] Various elements ensure the delivery and activity of IL-2 preferentially at the site of desired IL-2 activity and to severely limit systemic exposure to the interleukin via a blocking and/or a targeting strategy preferentially linked to a serum half-life extension strategy. In this serum half-life extension strategy, the blocked version of interleukin circulates for extended times (preferentially 1-2 or more weeks) but the activated version has the typical serum half-life of the interleukin.

[0140] By comparison to a serum half-life extended version, the serum half-life of IL-2 administered intravenously is only ˜10 minutes due to distribution into the total body extracellular space, which is large, ˜15 L in an average sized adult. Subsequently, IL-2 is metabolized by the kidneys with a half-life of ˜2.5 hours. (Smith, K. “Interleukin 2 immunotherapy.” Therapeutic Immunology 240 (2001)). By other measurements, IL-2 has a very short plasma half-life of 85 minutes for intravenous administration and 3.3 hours subcutaneous administration (Kirchner, G. I., et al., 1998, Br J Clin Pharmacol. 46:5-10). In some embodiments of this invention, the half-life extension element is linked to the interleukin via a linker which is cleaved at the site of action (e.g. by inflammation-specific or tumor-specific proteases) releasing the interleukin's full activity at the desired site and also separating it from the half-life extension of the uncleaved version. In such embodiments, the fully active and free interleukin would have very different pharmacokinetic (pK) properties—a half-life of hours instead of weeks. In addition, exposure to active cytokine is limited to the site of desired cytokine activity (e.g., an inflammatory site or tumor) and systemic exposure to active cytokine, and associated toxicity and side effects, are reduced.

[0141] Other cytokines envisioned in this invention have similar pharmacology (e.g. IL-1S as reported by Blood 2011 117:4787-4795; doi: doi.org/10.1182/blood-2010-10-311456) as IL-2 and accordingly, the designs of this invention address the shortcomings of using these agents directly, and provide chimeric polypeptides that can have extended half-life and/or be targeted to a site of desired activity (e.g., a site of inflammation or a tumor).

[0142] If desired, IL-2 can be engineered to bind the IL-2R complex generally or one of the three IL-2R subunits specifically with an affinity that differs from that of the corresponding wild-type IL-2, for example to selectively activate Tregs or Teff. For example, IL-2 polypeptides that are said to have higher affinity for the trimeric form of the IL-2 receptor relative to the dimeric beta/gamma form of the Il-2 receptor in comparison to wild type IL-2 can have an amino acid sequence that includes one of the following sets of mutations with respect to SEQ ID NO:1 (a mature IL-2 protein comprising amino acids 21-153 of human IL-2 having the Uniprot Accession No. P60568-1): (a) K64R, V69A, and Q74P; (b) V69A, Q74P, and T101A; (c) V69A, Q74P, and I128T; (d) N30D, V69A, Q74P, and F1035; (e) K49E, V69A, A73V, and K76E; (1) V69A, Q74P, T101A, and T133N; (g) N305, V69A, Q74P, and I128A; (h) V69A, Q74P, N88D, and S99P; (i) N305, V69A, Q74P, and I128T; (j) K9T, Q11R, K35R, V69A, and Q74P; (k) A1T, M46L, K49R, E61D, V69A, and H79R; (1) K48E, E68D, N71T, N90H, F1035, and I114V; (m) S4P, T10A, Q11R, V69A, Q74P, N88D, and T133A; (n) E15K, N305 Y31H, K35R, K48E, V69A, Q74P, and I92T; (o) N305, E68D, V69A, N71A, Q74P, 575P, K76R, and N90H; (p) N305, Y31C, T37A, V69A, A73V, Q74P, H79R, and I128T; (q) N26D, N29S, N305, K54R, E67G, V69A, Q74P, and I92T; (r) K8R, Q13R, N26D, N30T, K35R, 1′37R, V69A, Q74P, and I92T; and (s) N29S, Y31H, K35R, T37A, K48E, V69A, N71R, Q74P, N88D, and I89V. This approach can also be applied to prepare muteins of other cytokines including interleukins (e.g., IL-2, IL-7, IL-12, IL-1S, IL-18, IL-23), interferons (IFNs, including IFNalpha, IFNbeta and IFNgamma), tumor necrosis factors (e.g., TNFalpha, lymphotoxin), transforming growth factors (e.g., TGFbeta1, TGFbeta2, TGFbeta3) and granulocyte macrophage-colony stimulating factor (GM-CS). For example, muteins can be prepared that have desired binding affinity for a cognate receptor.

[0143] As noted above, any of the mutant IL-2 polypeptides disclosed herein can include the sequences described; they can also be limited to the sequences described and otherwise identical to SEQ ID NO:1. Moreover, any of the mutant IL-2 polypeptides disclosed herein can optionally include a substitution of the cysteine residue at position 125 with another residue (e.g., serine) and/or can optionally include a deletion of the alanine residue at position 1 of SEQ ID NO:1.

[0144] Another approach to improving the therapeutic index of an IL-2 based therapy is to optimize the pharmacokinetics of the molecule to maximally activate Treg cells. Early studies of IL-2 action demonstrated that IL-2 stimulation of human T cell proliferation in vitro required a minimum of 5-6 hours exposure to effective concentrations of IL-2 (Cantrell, D. A., et. al., 1984, Science, 224: 1312-1316). When administered to human patients, IL-2 has a very short plasma half-life of 85 minutes for intravenous administration and 3.3 hours subcutaneous administration (Kirchner, G. I., et al., 1998, Br J Clin Pharmacol. 46:5-10). Because of its short half-life, maintaining circulating IL-2 at or above the level necessary to stimulate T cell proliferation for the necessary duration necessitates high doses that result in peak IL-2 levels significantly above the EC50 for Treg cells or will require frequent administration. These high IL-2 peak levels can activate IL2Rβr receptors and have other unintended or adverse effects, for example VLS as noted above. An IL-2 analog, or a multifunctional protein with IL-2 attached to a domain that enables binding to the FcRn receptor, with a longer circulating half-life than IL-2 can achieve a target drug concentration for a specified period of time at a lower dose than IL-2, and with lower peak levels. Such an IL-2 analog will therefore require either lower doses or less frequent administration than IL-2 to effectively stimulate Treg cells. Less frequent subcutaneous administration of an IL-2 drug will also be more tolerable for patients. A therapeutic with these characteristics will translate clinically into improved pharmacological efficacy, reduced toxicity, and improved patient compliance with therapy. Alternatively, IL-2 or muteins of IL-2 (herein, “IL-2*”) can be selectively targeted to the intended site of action (e.g. sites of inflammation or a tumor). This targeting can be achieved by one of several strategies, including the addition of domains to the administered agent that comprise blockers of the IL-2 (or muteins) that are cleaved away or by targeting domains or a combination of the two.

[0145] In some embodiments, IL-2* partial agonists can be tailored to bind with higher or lower affinity depending on the desired target; for example, an IL-2* can be engineered to bind with enhanced affinity to one of the receptor subunits and not the others. These types of partial agonists, unlike full agonists or complete antagonists, offer the ability to tune the signaling properties to an amplitude that elicits desired functional properties while not meeting thresholds for undesired properties. Given the differential activities of the partial agonists, a repertoire of IL-2 variants could be engineered to exhibit an even finer degree of distinctive signaling activities, ranging from almost full to partial agonism to complete antagonism.

[0146] In some embodiments, the IL-2* has altered affinity for IL-2Rα In some embodiments, the IL-2* has a higher affinity for IL-2Rα than wild-type IL-2. In other embodiments, the IL-2* has altered affinity for IL-2R8. In one embodiment, IL-2* has enhanced binding affinity for IL-2Rβ, e.g., the N-terminus of IL-2R3, that eliminates the functional requirement for IL-2Rα In another embodiment, an IL-2* is generated that has increased binding affinity for IL-2Rβ but that exhibited decreased binding to IL-2R7, and thereby is defective IL-2Rβ7 heterodimerization and signaling.

[0147] Blocking moieties, described in further detail below, can also be used to favor binding to or activation of one or more receptors. In one embodiment, blocking moieties are added such that IL-2Rβ7 binding or activation is blocked but IL-2Rα binding or activation is not changed. In another embodiment, blocking moieties are added such that IL-2Rα binding or activation is diminished. In another embodiment, blocking moieties are added such that binding to and or activation of all three receptors is inhibited. This blocking may be relievable by removal of the blocking moieties in a particular environment, for example by proteolytic cleavage of a linker linking one or more blocking moieties to the cytokine.

[0148] A similar approach can be applied to improve other cytokines, particularly for use as immunostimulatory agents, for example for treating cancer. For example, in this aspect, the pharmacokinetics and/or pharmacodynamics of the cytokine (e.g., IL-2, IL-7, IL-12, IL-15, IL-18, IL-21 IL-23, IFNalpha, IFNbeta and IFNgamma, TNFalpha, lymphotoxin, TGFbeta1, TGFbeta2, TGFbeta3 GM-CSF, CXCL10, CCL19, CCL20, and CCL21 can be tailored to maximally activate effector cells (e.g., effect T cells, NK cells) and/or cytotoxic immune response promoting cells (e.g., induce dendritic cell maturation) at a site of desired activity, such as in a tumor, but preferably not systemically.

[0149] Thus, provided herein are pharmaceutical compositions comprising at least one cytokine polypeptide, such as interleukins (e.g., IL-2, IL-7, IL-12, IL-15, IL-18, IL-21, IL-23), interferons (IFNs, including IFNalpha, IFNbeta and IFNgamma), tumor necrosis factors (e.g., TNFalpha, lymphotoxin), transforming growth factors (e.g., TGFbeta1, TGFbeta2, TGFbeta3), chemokines (e.g. CXCL10, CCL19, CCL20, CCL21) and granulocyte macrophage-colony stimulating factor (GM-CS) or a functional fragment or mutein of any of the foregoing. The polypeptide typically also includes at least one linker amino acid sequence, wherein the amino acid sequence is in certain embodiments capable of being cleaved by an endogenous protease. In one embodiment, the linker comprises an amino acid sequence comprising HSSKLQ (SEQ ID NO.: 25), GPLGVRG (SEQ ID NO.: 445), IPVSLRSG (SEQ ID NO.: 446), VPLSLYSG (SEQ ID NO. 447), or SGESPAYYTA (SEQ ID NO. 448). In other embodiments, the chimeric polypeptide further contains a blocking moiety, e.g. a steric blocking polypeptide moiety, capable of blocking the activity of the interleukin polypeptide. The blocking moiety, for example, can comprise a human serum albumin (HSA) binding domain or an optionally branched or multi-armed polyethylene glycol (PEG). Alternatively, the pharmaceutical composition comprises a first cytokine polypeptide or a fragment thereof, and blocking moiety, e.g. a steric blocking polypeptide moiety, wherein the blocking moiety blocks the activity of the cytokine polypeptide on the cytokine receptor, and wherein the blocking moiety in certain embodiments comprises a protease cleavable domain. In some embodiments, blockade and reduction of cytokine activity is achieved simply by attaching additional domains with very short linkers to the N or C terminus of the interleukin domain. In such embodiments, it is anticipated the blockade is relieved by protease digestion of the blocking moiety or of the short linker that tethers the blocker to the interleukin. Once the domain is clipped or is released, it will no longer be able to achieve blockade of cytokine activity.

[0150] The pharmaceutical composition e.g., chimeric polypeptide can comprise two or more cytokines, which can be the same cytokine polypeptide or different cytokine polypeptides. For example, the two or more different types of cytokines have complementary functions. In some examples, a first cytokine is IL-2 and a second cytokine is IL-12. In some embodiments, each of the two or more different types of cytokine polypeptides have activities that modulate the activity of the other cytokine polypeptides. In some examples of chimeric polypeptides that contain two cytokine polypeptides, a first cytokine polypeptide is Tell activating, and a second cytokine polypeptide is non-Tell-activating. In some examples of chimeric polypeptides that contain two cytokine polypeptides, a first cytokine is a chemoattractant, e.g. CXCL10, and a second cytokine is an immune cell activator.

[0151] Preferably, the cytokine polypeptides (including functional fragments) that are included in the fusion proteins disclosed herein are not mutated or engineered to alter the properties of the naturally occurring cytokine, including receptor binding affinity and specificity or serum half-life. However, changes in amino acid sequence from naturally occurring (including wild type) cytokine are acceptable to facilitate cloning and to achieve desired expression levels, for example.

### Blocking Moiety

[0152] The blocking moiety can be any moiety that inhibits the ability of the cytokine to bind and/or activate its receptor. The blocking moiety can inhibit the ability of the cytokine to bind and/or activate its receptor sterically blocking and/or by noncovalently binding to the cytokine. Examples of suitable blocking moieties include the full length or a cytokine-binding fragment or mutein of the cognate receptor of the cytokine. Antibodies and fragments thereof including, a polyclonal antibody, a recombinant antibody, a human antibody, a humanized antibody a single chain variable fragment (scFv), single-domain antibody such as a heavy chain variable domain (VH), a light chain variable domain (VL) and a variable domain of camelid-type nanobody (VHH), a dAb and the like that bind the cytokine can also be used. Other suitable antigen-binding domain that bind the cytokine can also be used, include non-immunoglobulin proteins that mimic antibody binding and/or structure such as, anticalins, affilins, affibody molecules, affimers, affitins, alphabodies, avimers, DARPins, fynomers, kunitz domain peptides, monobodies, and binding domains based on other engineered scaffolds such as SpA, GroEL, fibronectin, lipocallin and CTLA4 scaffolds. Further examples of suitable blocking polypeptides include polypeptides that sterically inhibit or block binding of the cytokine to its cognate receptor. Advantageously, such moieties can also function as half-life extending elements. For example, a peptide that is modified by conjugation to a water-soluble polymer, such as PEG, can sterically inhibit or prevent binding of the cytokine to its receptor. Polypeptides, or fragments thereof, that have long serum half-lives can also be used, such as serum albumin (human serum albumin), immunoglobulin Fc, transferrin and the like, as well as fragments and muteins of such polypeptides. Antibodies and antigen-binding domains that bind to, for example, a protein with a long serum half-life such as HSA, immunoglobulin or transferrin, or to a receptor that is recycled to the plasma membrane, such as FcRn or transferrin receptor, can also inhibit the cytokine, particularly when bound to their antigen. Examples of such antigen-binding polypeptides include a single chain variable fragment (scFv), single-domain antibody such as a heavy chain variable domain (VH), a light chain variable domain (VL) and a variable domain of camelid-type nanobody (VHH), a dAb and the like. Other suitable antigen-binding domain that bind the cytokine can also be used, include non-immunoglobulin proteins that mimic antibody binding and/or structure such as, anticalins, affilins, affibody molecules, affuners, affitins, alphabodies, avimers, DARPins, fynomers, kunitz domain peptides, monobodies, and binding domains based on other engineered scaffolds such as SpA, GroEL, fibronectin, lipocallin and CTLA4 scaffolds.

[0153] In illustrative examples, when IL-2 is the cytokine in the chimeric polypeptide, the blocking moiety can be the full length or fragment or mutein of the alpha chain of IL-2 receptor (IL-2Rα) or beta (IL-2Rβ) or gamma chain of IL-2 receptor (IL-2R7), an anti-IL-2 single-domain antibody (dAb) or scFv, a Fab, an anti-CD25 antibody or fragment thereof, and anti-HSA dAb or scFv, and the like. As described further herein, when an antibody fragment is used to attenuate the activity of the cytokine polypeptide, the blocking moiety in the fusion protein can be a single chain antibody binding fragment, such as an scFv. The blocking moiety can also be half of a two chain antigen binding fragment such as a VH-CH1, which associates with a complementary VL-CL on a second polypeptide for form an antibody binding site the binds the cytokine polypeptide.

in vivo Half-life Extension Elements

[0154] Preferably, the chimeric polypeptides comprise an in vivo half-life extension element. Increasing the in vivo half-life of therapeutic molecules with naturally short half-lives allows for a more acceptable and manageable dosing regimen without sacrificing effectiveness. As used herein, a “half-life extension element” is a part of the chimeric polypeptide that increases the in vivo half-life and improve pK, for example, by altering its size (e.g., to be above the kidney filtration cutoff), shape, hydrodynamic radius, charge, or parameters of absorption, biodistribution, metabolism, and elimination. An exemplary way to improve the pK of a polypeptide is by expression of an element in the polypeptide chain that binds to receptors that are recycled to the plasma membrane of cells rather than degraded in the lysosomes, such as the FcRn receptor on endothelial cells and transferrin receptor. Three types of proteins, e.g., human IgGs, HSA (or fragments), and transferrin, persist for much longer in human serum than would be predicted just by their size, which is a function of their ability to bind to receptors that are recycled rather than degraded in the lysosome. These proteins, or fragments of them that retain the FcRn binding are routinely linked to other polypeptides to extend their serum half-life. In one embodiment, the half-life extension element is a human serum albumin (HSA) binding domain. HSA (SEQ ID NO: 2) may also be directly bound to the pharmaceutical compositions or bound via a short linker. Fragments of HSA may also be used. HSA and fragments thereof can function as both a blocking moiety and a half-life extension element. Human IgGs and Fc fragments can also carry out a similar function.

[0155] The serum half-life extension element can also be antigen-binding polypeptide that binds to a protein with a long serum half-life such as serum albumin, transferrin and the like. Examples of such polypeptides include antibodies and fragments thereof including, a polyclonal antibody, a recombinant antibody, a human antibody, a humanized antibody a single chain variable fragment (scFv), single-domain antibody such as a heavy chain variable domain (VH), a light chain variable domain (VL) and a variable domain of camelid-type nanobody (VHH), a dAb and the like. Other suitable antigen-binding domain include non-immunoglobulin proteins that mimic antibody binding and/or structure such as, anticalins, affilins, affibody molecules, affimers, affitins, alphabodies, avimers, DARPins, fynomers, kunitz domain peptides, monobodies, and binding domains based on other engineered scaffolds such as SpA, GroEL, fibronectin, lipocallin and CTLA4 scaffolds. Further examples of antigen-binding polypeptides include a ligand for a desired receptor, a ligand-binding portion of a receptor, a lectin, and peptides that binds to or associates with one or more target antigens.

[0156] Some preferred serum half-life extension elements are polypeptides that comprise complementarity determining regions (CDRs), and optionally non-CDR loops. Advantageously, such serum half-life extension elements can extend the serum half-life of the cytokine, and also function as inhibitors of the cytokine (e.g., via steric blocking, non-covalent interaction or combination thereof) and/or as targeting domains. In some instances, the serum half-life extension elements are domains derived from an immunoglobulin molecule (Ig molecule) or engineered protein scaffolds that mimic antibody structure and/or binding activity. The Ig may be of any class or subclass (IgG1, IgG2, IgG3, IgG4, IgA, IgE, IgM etc). A polypeptide chain of an Ig molecule folds into a series of parallel beta strands linked by loops. In the variable region, three of the loops constitute the “complementarity determining regions” (CDRs) which determine the antigen binding specificity of the molecule. An IgG molecule comprises at least two heavy (H) chains and two light (L) chains inter-connected by disulfide bonds, or an antigen binding fragment thereof. Each heavy chain is comprised of a heavy chain variable region (abbreviated herein as VH) and a heavy chain constant region. The heavy chain constant region is comprised of three domains, CH1, CH2 and CH3. Each light chain is comprised of a light chain variable region (abbreviated herein as VL) and a light chain constant region. The light chain constant region is comprised of one domain, CL. The VH and VL regions can be further subdivided into regions of hypervariability, termed complementarity determining regions (CDRs) with are hypervariable in sequence and/or involved in antigen recognition and/or usually form structurally defined loops, interspersed with regions that are more conserved, termed framework regions (FR). Each VH and VL is composed of three CDRs and four FRs, arranged from amino-terminus to carboxy-terminus in the following order: FR1, CDR1, FR2, CDR2, FR3, CDR3, FR4. In some embodiments of this disclosure, at least some or all of the amino acid sequences of FR1, FR2, FR3, and FR4 are part of the “non-CDR loop” of the binding moieties described herein. A variable domain of an immunoglobulin molecule has several beta strands that are arranged in two sheets. The variable domains of both light and heavy immunoglobulin chains contain three hypervariable loops, or complementarity-determining regions (CDRs). The three CDRs of a V domain (CDR1, CDR2, CDR3) cluster at one end of the beta barrel. The CDRs are the loops that connect beta strands B-C, C′-C″, and F-G of the immunoglobulin fold, whereas the bottom loops that connect beta strands AB, CC′, C″-D and E-F of the immunoglobulin fold, and the top loop that connects the D-E strands of the immunoglobulin fold are the non-CDR loops. In some embodiments of this disclosure, at least some amino acid residues of a constant domain, CH1, CH2, or CH3, are part of the “non-CDR loop” of the binding moieties described herein. Non-CDR loops comprise, in some embodiments, one or more of AB, CD, EF, and DE loops of a Cl-set domain of an Ig or an Ig-like molecule; AB, CC′, EF, FG, BC, and EC′ loops of a C2-set domain of an Ig or an Ig-like molecule; DE, BD, GF, A(A1A2)B, and EF loops of I(Intermediate)-set domain of an Ig or Ig-like molecule.

[0157] Within the variable domain, the CDRs are believed to be responsible for antigen recognition and binding, while the FR residues are considered a scaffold for the CDRs. However, in certain cases, some of the FR residues play an important role in antigen recognition and binding. Framework region residues that affect Ag binding are divided into two categories. The first are FR residues that contact the antigen, thus are part of the binding-site, and some of these residues are close in sequence to the CDRs. Other residues are those that are far from the CDRs in sequence, but are in close proximity to it in the 3-D structure of the molecule, e.g., a loop in heavy chain.

[0158] The binding moieties are any kinds of polypeptides. For example, in certain instances the binding moieties are natural peptides, synthetic peptides, or fibronectin scaffolds, or engineered bulk serum proteins. The bulk serum protein comprises, for example, albumin, fibrinogen, or a globulin. In some embodiments, the binding moieties are engineered scaffolds. Engineered scaffolds comprise, for example, sdAb, a scFv, a Fab, a VHH, a fibronectin type III domain, immunoglobulin-like scaffold (as suggested in Halaby et al., 1999. Prot Eng 12(γ):563-571), DARPin, cystine knot peptide, lipocalin, three-helix bundle scaffold, protein G-related albumin-binding module, or a DNA or RNA aptamer scaffold.

[0159] In some cases, the serum half-life extending element comprises a binding site for a bulk serum protein. In some embodiments, the CDRs provide the binding site for the bulk serum protein. The bulk serum protein is, in some examples, a globulin, albumin, transferrin, IgG1, IgG2, IgG4, IgG3, IgA monomer, Factor XIII, Fibrinogen, IgE, or pentameric IgM. In some embodiments, the CDR form a binding site for an immunoglobulin light chain, such as an Igκ free light chain or an Igλ free light chain.

[0160] The serum half-life extension element can be any type of binding domain, including but not limited to, domains from a monoclonal antibody, a polyclonal antibody, a recombinant antibody, a human antibody, a humanized antibody. In some embodiments, the binding moiety is a single chain variable fragment (scFv), single-domain antibody such as a heavy chain variable domain (VH), a light chain variable domain (VL) and a variable domain (VHH) of camelid derived nanobody. In other embodiments, the binding moieties are non-Ig binding domains, i.e., antibody mimetic, such as anticalins, affilins, affibody molecules, affimers, affitins, alphabodies, avimers, DARPins, fynomers, kunitz domain peptides, and monobodies.

[0161] In other embodiments, the serum half-life extension element can be a water-soluble polymer or a peptide that is conjugated to a water-soluble polymer, such as PEG. “PEG,” “polyethylene glycol” and “poly(ethylene glycol)” as used herein, are interchangeable and encompass any nonpeptidic water-soluble poly(ethylene oxide). The term “PEG” also means a polymer that contains a majority, that is to say, greater than 50%, of —OCH₂CH₂— repeating subunits. With respect to specific forms, the PEG can take any number of a variety of molecular weights, as well as structures or geometries such as “branched,” “linear,” “forked,” “multifunctional,” and the like, to be described in greater detail below. The PEG is not limited to a particular structure and can be linear (e.g., an end capped, e.g., alkoxy PEG or a bifunctional PEG), branched or multi-armed (e.g., forked PEG or PEG attached to a polyol core), a dendritic (or star) architecture, each with or without one or more degradable linkages. Moreover, the internal structure of the PEG can be organized in any number of different repeat patterns and can be selected from the group consisting of homopolymer, alternating copolymer, random copolymer, block copolymer, alternating tripolymer, random tripolymer, and block tripolymer. PEGS can be conjugated to polypeptide and peptides through any suitable method. Typically, a reactive PEG derivative, such as N-hydroxysuccinamidyl ester PEG, is reacted with a peptide or polypeptide that includes amino acids with a side chain that contains an amine, sulfhydryl, carboxylic acid or hydroxyl functional group, such as cysteine, lysine, asparagine, glutamine, thionine, tyrosine, scrim, aspartic acid, and glutamic acid.

### Targeting and Retention Domains

[0162] For certain applications, it may be desirable to maximize the amount of time the construct is present in its desired location in the body. This can be achieved by including one further domain in the chimeric polypeptide (fusion protein) to influence its movements within the body. For example, the chimeric nucleic acids can encode a domain that directs the polypeptide to a location in the body, e.g., tumor cells or a site of inflammation; this domain is termed a “targeting domain” and/or encode a domain that retains the polypeptide in a location in the body, e.g., tumor cells or a site of inflammation; this domain is termed a “retention domain”. In some embodiments a domain can function as both a targeting and a retention domain. In some embodiments, the targeting domain and/or retention domain are specific to a protease-rich environment. In some embodiments, the encoded targeting domain and/or retention domain are specific for regulatory T cells (Tregs), for example targeting the CCR4 or CD39 receptors. Other suitable targeting and/or retention domains comprise those that have a cognate ligand that is overexpressed in inflamed tissues, e.g., the IL-1 receptor, or the IL-6 receptor. In other embodiments, the suitable targeting and/or retention domains comprise those who have a cognate ligand that is overexpressed in tumor tissue, e.g., Epcam, CEA or mesothelin. In some embodiments, the targeting domain is linked to the interleukin via a linker which is cleaved at the site of action (e.g. by inflammation or cancer specific proteases) releasing the interleukin full activity at the desired site. In some embodiments, the targeting and/or retention domain is linked to the interleukin via a linker which is not cleaved at the site of action (e.g. by inflammation or cancer specific proteases), causing the cytokine to remain at the desired site.

[0163] Antigens of choice, in some cases, are expressed on the surface of a diseased cell or tissue, for example a tumor or a cancer cell. Antigens useful for tumor targeting and retention include but are not limited to EpCAM, EGFR, HER-2, HER-3, c-Met, FOLR1, and CEA. Pharmaceutical compositions disclosed herein, also include proteins comprising two targeting and/or retention domains that bind to two different target antigens known to be expressed on a diseased cell or tissue. Exemplary pairs of antigen binding domains include but are not limited to EGFR/CEA, EpCAM/CEA, and HER-2/HER-3.

[0164] Suitable targeting and/or retention domains include antigen-binding domains, such as antibodies and fragments thereof including, a polyclonal antibody, a recombinant antibody, a human antibody, a humanized antibody a single chain variable fragment (scFv), single-domain antibody such as a heavy chain variable domain (VH), a light chain variable domain (VL) and a variable domain of camelid-type nanobody (VHH), a dAb and the like. Other suitable antigen-binding domain include non-immunoglobulin proteins that mimic antibody binding and/or structure such as, anticalins, affilins, affibody molecules, affiners, affitins, alphabodies, avimers, DARPins, fynomers, kunitz domain peptides, monobodies, and binding domains based on other engineered scaffolds such as SpA, GroEL, fibronectin, lipocallin and CTLA4 scaffolds. Further examples of antigen-binding polypeptides include a ligand for a desired receptor, a ligand-binding portion of a receptor, a lectin, and peptides that binds to or associates with one or more target antigens.

[0165] In some embodiments, the targeting and/or retention domains specifically bind to a cell surface molecule. In some embodiments, the targeting and/or retention domains specifically bind to a tumor antigen. In some embodiments, the targeting polypeptides specifically and independently bind to a tumor antigen selected from at least one of Fibroblast activation protein alpha (FAPa), Trophoblast glycoprotein (5T4), Tumor-associated calcium signal transducer 2 (Trop2), Fibronectin EDB (EDB-FN), fibronectin EIIIB domain, CGS-2, EpCAM, EGFR, HER-2, HER-3, cMet, CEA, and FOLR1. In some embodiments, the targeting polypeptides specifically and independently bind to two different antigens, wherein at least one of the antigens is a tumor antigen selected from EpCAM, EGFR, HER-2, HER-3, cMet, CEA, and FOLR1.

[0166] The targeting and/or retention antigen can be a tumor antigen expressed on a tumor cell. Tumor antigens are well known in the art and include, for example, EpCAM, EGFR, HER-2, HER-3, c-Met, FOLR1, PSMA, CD38, BCMA, and CEA. 5T4, AFP, B7-H3, Cadherin-6, CAIX, CD117, CD123, CD138, CD166, CD19, CD20, CD205, CD22, CD30, CD33, CD352, CD37, CD44, CD52, CD56, CD70, CD71, CD74, CD79b, DLL3, EphA2, FAP, FGFR2, FGFR3, GPC3, gpA33, FLT-3, gpNMB, HPV-16 E6, HPV-16 E7, ITGA2, ITGA3, SLC39A6, MAGE, mesothelin, Muc1, Muc16, NaPi2b, Nectin-4, P-cadherin, NY-ESO-1, PRLR, PSCA, PTK7, ROR1, SLC44A4, SLTRK5, SLTRK6, STEAP1, TIM1, Trop2, WTI.

[0167] The targeting and/or retention antigen can be an immune checkpoint protein. Examples of immune checkpoint proteins include but are not limited to CD27, CD137, 2B4, TIGIT, CD155, ICOS, HVEM, CD40L, LIGHT, TIM-1, OX40, DNAM-1, PD-L1, PD1, PD-L2, CTLA-4, CD8, CD40, CEACAM1, CD48, CD70, A2AR, CD39, CD73, B7-H3, B7-H4, BTLA, IDO1, IDO2, TDO, MR, LAG-3, TIM-3, or VISTA.

[0168] The targeting and/or retention antigen can be a cell surface molecule such as a protein, lipid or polysaccharide. In some embodiments, a targeting and/or retention antigen is a on a tumor cell, virally infected cell, bacterially infected cell, damaged red blood cell, arterial plaque cell, inflamed or fibrotic tissue cell. The targeting and/or retention antigen can comprise an immune response modulator. Examples of immune response modulator include but are not limited to granulocyte-macrophage colony stimulating factor (GM-CSF), macrophage colony stimulating factor (M-CSF), granulocyte colony stimulating factor (G-CSF), interleukin 2 (IL-2), interleukin 3 (IL-3), interleukin 12 (IL-12), interleukin 15 (IL-1S), B7-1 (CD80), B7-2 (CD86), GITRL, CD3, or GITR.

[0169] The targeting and/or retention antigen can be a cytokine receptor. Examples, of cytokine receptors include but are not limited to Type I cytokine receptors, such as GM-CSF receptor, G-CSF receptor, Type I IL receptors, Epo receptor, LIF receptor, CNTF receptor, TPO receptor, Type II Cytokine receptors, such as IFN-alpha receptor (IFNAR1, IFNAR2), IFB-beta receptor, IFN-gamma receptor (IFNGR1, IFNGR2), Type II IL receptors; chemokine receptors, such as CC chemokine receptors, CXC chemokine receptors, CX3C chemokine receptors, XC chemokine receptors; tumor necrosis receptor superfamily receptors, such as TNFRSF5/CD40, TNFRSF8/CD30, TNFRSF7/CD27, TNFRSF1A/TNFR1/CD120a, TNFRSF1B/TNFR2/CD120b; TGF-beta receptors, such as TGF-beta receptor 1, TGF-beta receptor 2; Ig super family receptors, such as IL-1 receptors, CSF-1R, PDGFR (PDGFRA, PDGFRB), SCFR.

### Linkers

[0170] As stated above, the pharmaceutical compositions comprise one or more linker sequences. A linker sequence serves to provide flexibility between polypeptides, such that, for example, the blocking moiety is capable of inhibiting the activity of the cytokine polypeptide. The linker sequence can be located between any or all of the cytokine polypeptide, the serum half-life extension element, and/or the blocking moiety. As described herein at least one of the linkers is protease cleavable, and contains a (one or more) cleavage site for a (one or more) desired protease. Preferably, the desired protease is enriched or selectively expressed at the desired site of cytokine activity (e.g., the tumor microenvironment). Thus, the fusion protein is preferentially or selectively cleaved at the site of desired cytokine activity.

[0171] Suitable linkers can be of different lengths, such as from 1 amino acid (e.g., Gly) to 20 amino acids, from 2 amino acids to 15 amino acids, from 3 amino acids to 12 amino acids, including 4 amino acids to 10 amino acids, amino acids to 9 amino acids, 6 amino acids to 8 amino acids, or 7 amino acids to 8 amino acids, and may be 1, 2, 3, 4, 5, 6, 7, 8, 9, 10, 11, 12, 13, 14, 15, 16, 17, 18, 19, 20, 21, 22, 23, 24, 25, 26, 27, 28, 29, 30, 31, 32, 33, 34, 35, 36, 37, 38, 39, 40, 41, 42, 43, 44, 45, 46, 47, 48, 49, 50, 51, 52, 53, 54, 55, 56, 57, 58, 59, or 60 amino acids.

[0172] The orientation of the components of the pharmaceutical composition, are largely a matter of design choice and it is recognized that multiple orientations are possible and all are intended to be encompassed by this disclosure. For example, a blocking moiety can be located C-terminally or N-terminally to a cytokine polypeptide.

[0173] Proteases known to be associated with diseased cells or tissues include but are not limited to serine proteases, cysteine proteases, aspartate proteases, threonine proteases, glutamic acid proteases, metalloproteases, asparagine peptide lyases, serum proteases, cathepsins, Cathepsin B, Cathepsin C, Cathepsin D, Cathepsin E, Cathepsin K, Cathepsin L, kallikreins, hK1, hK10, hK15, plasmin, collagenase, Type IV collagenase, stromelysin, Factor Xa, chymotrypsin-like protease, trypsin-like protease, elastase-like protease, subtilisin-like protease, actinidain, bromelain, calpain, caspases, caspase-3, Mirl-CP, papain, HIV-1 protease, HSV protease, CMV protease, chymosin, renin, pepsin, matriptase, legumain, plasmepsin, nepenthesin, metalloexopeptidases, metalloendopeptidases, matrix metalloproteases (MMP), MMP1, MMP2, MMP3, MMP8, MMP9, MMP13, MMP11, MMP14, urokinase plasminogen activator (uPA), enterokinase, prostate-specific antigen (PSA, hK3), interleukin-1β converting enzyme, thrombin, FAP (FAP-a), dipeptidyl peptidase, meprins, granzymes and dipeptidyl peptidase IV (DPPIV/CD26). Proteases capable of cleaving amino acid sequences encoded by the chimeric nucleic acid sequences provided herein can, for example, be selected from the group consisting of a prostate specific antigen (PSA), a matrix metalloproteinase (MMP), an A Disintigrin and a Metalloproteinase (ADAM), a plasminogen activator, a cathepsin, a caspase, a tumor cell surface protease, and an elastase. The MMP can, for example, be matrix metalloproteinase 2 (MMP2) or matrix metalloproteinase 9 (MMP9).

[0174] Proteases useful in the methods disclosed herein are presented in Table 1, and exemplary proteases and their cleavage site are presented in Table 1a:

TABLE 1
Proteases relevant to inflammation and cancer

| | | |
|---|---|---|
| Protease | Specificity | Other aspects |

Secreted by killer T cells:

| | | |
|---|---|---|
| Granzyme B (grB) | Cleaves after Asp | Type of serine protease; strongly |
| | residues (asp-ase) | implicated in inducing perforin-dependent |
| | | target cell apoptosis |
| Granzyme A (grA) | trypsin-like, cleaves after | Type of serine protease; |
| | basic residues | |
| Granzyme H (grH) | Unknown substrate | Type of serine protease; |
| | specificity | Other granzymes are also secreted by |
| | | killer T cells, but not all are present in |
| | | humans |
| Caspase-8 | Cleaves after Asp | Type of cysteine protease; plays essential |
| | residues | role in TCR-induced cellular expansion- |
| | | exact molecular role unclear |
| Mucosa-associated | Cleaves after arginine | Type of cysteine protease; likely acts both |
| lymphoid tissue | residues | as a scaffold and proteolytically active |
| (MALT1) | | enzyme in the CBM-dependent signaling |
| | | pathway |
| Tryptase | Targets: angiotensin I, | Type of mast cell-specific serine protease; |
| | fibrinogen, prourokinase, | trypsin-like; resistant to inhibition by |
| | TGFβ; preferentially | macromolecular protease inhibitors |
| | cleaves proteins after | expressed in mammals due to their |
| | lysine or arginine | tetrameric structure, with all sites facing |
| | residues | narrow central pore; also associated with |
| | | inflammation |

Associated with inflammation:

| | | |
|---|---|---|
| Thrombin | Targets: FGF-2, | Type of serine protease; modulates |
| | HB-EGF, Osteo-pontin, | activity of vascular growth factors, |
| | PDGF, VEGF | chemokines and extracellular proteins; |
| | | strengthens VEGF-induced proliferation; |
| | | induces cell migration; angiogenic factor; |
| | | regulates hemostasis |
| Chymase | Exhibit chymotrypsin- | Type of mast cell-specific serine protease |
| | like specificity, cleaving | |
| | proteins after aromatic | |
| | amino acid residues | |
| Carboxypeptidase A | Cleaves amino acid | Type of zinc-dependent metalloproteinase |
| (MC-CPA) | residues from C-terminal | |
| | end of peptides and | |
| | proteins | |
| Kallikreins | Targets: high molecular | Type of serine protease; modulate |
| | weight | relaxation response; contribute to |
| | kininogen, pro-urokinase | inflammatory response; fibrin degradation |
| Elastase | Targets: E-cadherin, GM- | Type of neutrophil serine protease; |
| | CSF, IL-1, IL-2, IL-6, | degrades ECM components; regulates |
| | IL8, p38^{MAPK}, TNFα, VE- | inflammatory response; activates pro- |
| | cadherin | apoptotic signaling |
| Cathepsin G | Targets: EGF, ENA-78, | Type of serine protease; degrades ECM |
| | IL-8, MCP-1, MMP-2, | components; chemo-attractant of |
| | MT1-MMP, | leukocytes; regulates inflammatory |
| | PAI-1, RANTES, TGFβ | response; promotes apoptosis |
| | TNFα | |
| PR-3 | Targets: ENA-78, IL-8, | Type of serine protease; promotes |
| | IL-18, JNK, p38^{MAPK}, | inflammatory response; activates pro- |
| | TNFα | apoptotic signaling |
| Granzyme M (grM) | Cleaves after Met and | Type of serine protease; only expressed in |
| | other long, unbranched | NK cells |
| | hydrophobic residues | |
| Calpains | Cleave between Arg and | Family of cysteine proteases; calcium- |
| | Gly | dependent; activation is involved in the |
| | | process of numerous inflammation- |
| | | associated diseases |

TABLE 1a
Exemplary Proteases and Protease Recognition
Sequences

| | Cleavage | SEQ |
|---|---|---|
| | Domain | ID |
| Protease | Sequence | NO: |
| MMP7 | KRALGLPG | 3 |
| MMP7 | (DE)₈RPLALWRS(DR)₈ | 4 |
| MMP9 | PR(S/T)(L/I)(S/T) | 5 |
| MMP9 | LEATA | 6 |
| MMP11 | GGAANLVRGG | 7 |
| MMP14 | SGRIGFLRTA | 8 |
| MMP | PLGLAG | 9 |
| MMP | PLGLAX | 10 |
| MMP | PLGC(me)AG | 11 |
| MMP | ESPAYYTA | 12 |
| MMP | RLQLKL | 13 |
| MMP | RLQLKAC | 14 |
| MMP2, MMP9, MMP14 | EP(Cit)G(Hof)YL | 15 |
| Urokinase plasminogen | SGRSA | 16 |
| activator (uPA) | | |
| Urokinase plasminogen | DAFK | 17 |
| activator (uPA) | | |
| Urokinase plasminogen | GGGRR | 18 |
| activator (uPA) | | |
| Lysosomal Enzyme | GFLG | 19 |
| Lysosomal Enzyme | ALAL | 20 |
| Lysosomal Enzyme | FK | 21 |
| Cathepsin B | NLL | 22 |
| Cathepsin D | PIC(Et)FF | 23 |
| Cathepsin K | GGPRGLPG | 24 |
| Prostate Specific | HSSKLQ | 25 |
| Antigen | | |
| Prostate Specific | HSSKLQL | 26 |
| Antigen | | |
| Prostate Specific | HSSKLQEDA | 27 |
| Antigen | | |
| Herpes Simplex Virus | LVLASSSFGY | 28 |
| Protease | | |
| HIV Protease | GVSQNYPIVG | 29 |
| CMV Protease | GVVQASCRLA | 30 |
| Thrombin | F(Pip)RS | 31 |
| Thrombin | DPRSFL | 32 |
| Thrombin | PPRSFL | 33 |
| Caspase-3 | DEVD | 34 |
| Caspase-3 | DEVDP | 35 |
| Caspase-3 | KGSGDVEG | 36 |
| Interleukin 1β | GWEHDG | 37 |
| converting enzyme | | |
| Enterokinase | EDDDDKA | 38 |
| FAP | KQEQNPGST | 39 |
| Kallikrein 2 | GKAFRR | 40 |
| Plasmin | DAFK | 41 |
| Plasmin | DVLK | 42 |
| Plasmin | DAFK | 43 |
| TOP | ALLLALL | 44 |

[0175] Provided herein are pharmaceutical compositions comprising polypeptide sequences. As with all peptides, polypeptides, and proteins, including fragments thereof, it is understood that additional modifications in the amino acid sequence of the chimeric polypeptides (amino acid sequence variants) can occur that do not alter the nature or function of the peptides, polypeptides, or proteins. Such modifications include conservative amino acid substitutions and are discussed in greater detail below.

[0176] The compositions provided herein have a desired function. The compositions are comprised of at least a cytokine polypeptide, such as IL-2, IL-7, IL-12, IL-15, IL-18, IL-21, IFNα, or IFNγ, or a chemokine, such as CXCL10, CCL19, CCL20, CCL21, a blocking moiety, e.g. a steric blocking polypeptide, and an optional serum half-life extension element, and an optional targeting polypeptide, with one or more linkers connecting each polypeptide in the composition. The first polypeptide, e.g., an IL-2 mutein, is provided to be an active agent. The blocking moiety is provided to block the activity of the interleukin. The linker polypeptide, e.g., a protease cleavable polypeptide, is provided to be cleaved by a protease that is specifically expressed at the intended target of the active agent. Optionally, the blocking moiety blocks the activity of the first polypeptide by binding the interleukin polypeptide. In some embodiments, the blocking moiety, e.g. a steric blocking peptide, is linked to the interleukin via a protease-cleavable linker which is cleaved at the site of action (e.g. by inflammation-specific or tumor-specific proteases) releasing the cytokine full activity at the desired site.

[0177] The protease cleavage site may be a naturally occurring protease cleavage site or an artificially engineered protease cleavage site. The artificially engineered protease cleavage site can be cleaved by more than one protease specific to the desired environment in which cleavage will occur, e.g. a tumor. The protease cleavage site may be cleavable by at least one protease, at least two proteases, at least three proteases, or at least four proteases.

[0178] In some embodiments, the linker comprises glycine-glycine, a sortase-recognition motif, or a sortase-recognition motif and a peptide sequence (Gly₄Ser)ₙ (SEQ ID NO.: 443) or (Gly₃Ser)ₙ, (SEQ ID NO.: 444), wherein n is 1, 2, 3, 4 or 5. In one embodiment, the sortase-recognition motif comprises a peptide sequence LPXTG (SEQ ID NO.: 442), where X is any amino acid. In one embodiment, the covalent linkage is between a reactive lysine residue attached to the C-terminal of the cytokine polypeptide and a reactive aspartic acid attached to the N-terminal of the blocking or other moiety. In one embodiment, the covalent linkage is between a reactive aspartic acid residue attached to the N-terminal of the cytokine polypeptide and a reactive lysine residue attached to the C-terminal of the blocking or other moiety.

### Cleavage and Inducibility

[0179] As described herein, the activity of the cytokine polypeptide the context of the fusion protein is attenuated, and protease cleavage at the desired site of activity, such as in a tumor microenvironment, releases a form of the cytokine from the fusion protein that is much more active as a cytokine receptor agonist than the fusion protein. For example, the cytokine-receptor activating (agonist) activity of the fusion polypeptide can be at least about 10×, at least about 50×, at least about 100×, at least about 250×, at least about 500×, or at least about 1000× less than the cytokine receptor activating activity of the cytokine polypeptide as a separate molecular entity. The cytokine polypeptide that is part of the fusion protein exists as a separate molecular entity when it contains an amino acid that is substantially identical to the cytokine polypeptide and does not substantially include additional amino acids and is not associated (by covalent or non-covalent bonds) with other molecules. If necessary, a cytokine polypeptide as a separate molecular entity may include some additional amino acid sequences, such as a tag or short sequence to aid in expression and/or purification.

[0180] In other examples, the cytokine-receptor activating (agonist) activity of the fusion polypeptide is at least about 10×, at least about 50×, at least about 100×, at least about 250×, at least about 500×, or about 1000× less than the cytokine receptor activating activity of the polypeptide that contains the cytokine polypeptide that is produced by cleavage of the protease cleavable linker in the fusion protein. In other words, the cytokine receptor activating (agonist) activity of the polypeptide that contains the cytokine polypeptide that is produced by cleavage of the protease cleavable linker in the fusion protein is at least about 10×, at least about 50×, at least about 100×, at least about 250×, at least about 500×, or at least about 1000× greater than the cytokine receptor activating activity of the fusion protein.

### Polypeptide Variants and Amino Acid Substitutions

[0181] The polypeptides described herein can include components (e.g., the cytokine, the blocking moiety) that have the same amino acid sequence of the corresponding naturally occurring protein (e.g., IL-2, IL-15, HSA) or can have an amino acid sequence that differs from the naturally occurring protein so long as the desired function is maintained. It is understood that one way to define any known modifications and derivatives or those that might arise, of the disclosed proteins and nucleic acids that encode them is through defining the sequence variants in terms of identity to specific known reference sequences. Specifically disclosed are polypeptides and nucleic acids which have at least, 70, 71, 72, 73, 74, 75, 76, 77, 78, 79, 80, 81, 82, 83, 84, 85, 86, 87, 88, 89, 90, 91, 92, 93, 94, 95, 96, 97, 98, 99 percent identity to the chimeric polypeptides provided herein. For example, provided are polypeptides or nucleic acids that have at least, 70, 71, 72, 73, 74, 75, 76, 77, 78, 79, 80, 81, 82, 83, 84, 85, 86, 87, 88, 89, 90, 91, 92, 93, 94, 95, 96, 97, 98, 99 percent identity to the sequence of any of the nucleic acids or polypeptides described herein. Those of skill in the art readily understand how to determine the identity of two polypeptides or two nucleic acids. For example, the identity can be calculated after aligning the two sequences so that the identity is at its highest level.

[0182] Another way of calculating identity can be performed by published algorithms. Optimal alignment of sequences for comparison may be conducted by the local identity algorithm of Smith and Waterman Adv. Appl. Math. 2:482 (1981), by the identity alignment algorithm of Needleman and Wunsch, J. Mol. Biol. 48:443 (1970), by the search for similarity method of Pearson and Lipman, Proc. Natl. Acad. Sci. USA 85:2444 (1988), by computerized implementations of these algorithms (GAP, BESTFIT, FASTA, and TFASTA in the Wisconsin Genetics Software Package, Genetics Computer Group, 575 Science Dr., Madison, Wis.), or by inspection.

[0183] The same types of identity can be obtained for nucleic acids by, for example, the algorithms disclosed in Zuker, Science 244:48-52 (1989); Jaeger et al., Proc. Natl. Acad. Sci. USA 86:7706-7710 (1989); Jaeger et al., Methods Enzymol. 183:281-306 (1989), which are herein incorporated by reference for at least material related to nucleic acid alignment. It is understood that any of the methods typically can be used and that in certain instances the results of these various methods may differ, but the skilled artisan understands if identity is found with at least one of these methods, the sequences would be said to have the stated identity, and be disclosed herein.

[0184] Protein modifications include amino acid sequence modifications. Modifications in amino acid sequence may arise naturally as allelic variations (e.g., due to genetic polymorphism), may arise due to environmental influence (e.g., by exposure to ultraviolet light), or may be produced by human intervention (e.g., by mutagenesis of cloned DNA sequences), such as induced point, deletion, insertion and substitution mutants. These modifications can result in changes in the amino acid sequence, provide silent mutations, modify a restriction site, or provide other specific mutations. Amino acid sequence modifications typically fall into one or more of three classes: substitutional, insertional or deletional modifications. Insertions include amino and/or carboxyl terminal fusions as well as intrasequence insertions of single or multiple amino acid residues. Insertions ordinarily will be smaller insertions than those of amino or carboxyl terminal fusions, for example, on the order of one to four residues. Deletions are characterized by the removal of one or more amino acid residues from the protein sequence. Typically, no more than about from 2 to 6 residues are deleted at any one site within the protein molecule. Amino acid substitutions are typically of single residues, but can occur at a number of different locations at once; insertions usually will be on the order of about from 1 to 10 amino acid residues; and deletions will range about from 1 to 30 residues. Deletions or insertions preferably are made in adjacent pairs, i.e. a deletion of 2 residues or insertion of 2 residues. Substitutions, deletions, insertions or any combination thereof may be combined to arrive at a final construct. The mutations must not place the sequence out of reading frame and preferably will not create complementary regions that could produce secondary mRNA structure. Substitutional modifications are those in which at least one residue has been removed and a different residue inserted in its place. Such substitutions generally are made in accordance with the following Table 2 and are referred to as conservative substitutions.

TABLE 2
Exemplary amino acid substitutions

| Amino Acid | Exemplary Substitutions |
|---|---|
| Ala | Ser, Gly, Cys |
| Arg | Lys, Gln, Met, Ile |
| Asn | Gln, His, Glu, Asp |
| Asp | Glu, Asn, Gln |
| Cys | Ser, Met, Thr |
| Gln | Asn, Lys, Glu, Asp |
| Glu | Asp, Asn, Gln |
| Gly | Pro, Ala |
| His | Asn, Gln |
| He | Leu, Val, Met |
| Leu | Ile, Val, Met |
| Lys | Arg, Gln, Met, Ile |
| Met | Leu, Ile, Val |
| Phe | Met, Leu, Tyr, Trp, His |
| Ser | Thr, Met, Cys |
| Thr | Ser, Met, Val |
| Trp | Tyr, Phe |
| Tyr | Trp, Phe, His |
| Val | Ile, Leu, Met |

[0185] Modifications, including the specific amino acid substitutions, are made by known methods. For example, modifications are made by site specific mutagenesis of nucleotides in the DNA encoding the polypeptide, thereby producing DNA encoding the modification, and thereafter expressing the DNA in recombinant cell culture. Techniques for making substitution mutations at predetermined sites in DNA having a known sequence are well known, for example M13 primer mutagenesis and PCR mutagenesis.

[0186] Modifications can be selected to optimize binding. For example, affinity maturation techniques can be used to alter binding of the scFv by introducing random mutations inside the complementarity determining regions (CDRs). Such random mutations can be introduced using a variety of techniques, including radiation, chemical mutagens or error-prone PCR. Multiple rounds of mutation and selection can be performed using, for example, phage display.

[0187] The disclosure also relates to nucleic acids that encode the chimeric polypeptides described herein, and to the use of such nucleic acids to produce the chimeric polypeptides and for therapeutic purposes. For example, the invention includes DNA and RNA molecules (e.g., mRNA, self-replicating RNA) that encode a chimeric polypeptide and to the therapeutic use of such DNA and RNA molecules.

### Exemplary Compositions

[0188] Exemplary fusion proteins of the invention combine the above described elements in a variety of orientations. The orientations described in this section are meant as examples and are not to be considered limiting.

[0189] In some embodiments, the fusion protein comprises a cytokine, a blocking moiety and a half-life extension element. In some embodiments, the cytokine is positioned between the half-life extension element and the blocking moiety. In some embodiments, the cytokine is N-terminal to the blocking moiety and the half-life extension element. In some such embodiments, the cytokine is proximal to the blocking moiety; in some such embodiments, the cytokine is proximal to the half-life extension element. At least one protease-cleavable linker must be included in all embodiments, such that the cytokine may be active upon cleavage. In some embodiments, the cytokine is C-terminal to the blocking moiety and the half-life extension element. Additional elements may be attached to one another by a cleavable linker, a non-cleavable linker, or by direct fusion.

[0190] In some embodiments, the blocking domains used are capable of extending half-life, and the cytokine is positioned between two such blocking domains. In some embodiments, the cytokine is positioned between two blocking domains, one of which is capable of extending half-life.

[0191] In some embodiments, two cytokines are included in the same construct. In some embodiments, the cytokines are connected to two blocking domains each (three in total in one molecule), with a blocking domain between the two cytokine domains. In some embodiments, one or more additional half-life extension domains may be included to optimize pharmacokinetic properties. In some cases, it is beneficial to include two of the same cytokine to facilitate dimerization. An example of a cytokine that works as a dimer is IFN.

[0192] In some embodiments, three cytokines are included in the same construct. In some embodiments, the third cytokine may function to block the other two in place of a blocking domain between the two cytokines.

[0193] Preferred half-life extension elements for use in the fusion proteins are human serum albumin (HSA), an antibody or antibody fragment (e.g., scFV, dAb) which binds serum albumin, a human or humanized IgG, or a fragment of any of the foregoing. In some preferred embodiments, the blocking moiety is human serum albumin (HSA), or an antibody or antibody fragment which binds serum albumin, an antibody which binds the cytokine and prevents activation of binding or activation of the cytokine receptor, another cytokine, or a fragment of any of the foregoing. In preferred embodiments comprising an additional targeting domain, the targeting domain is an antibody which binds a cell surface protein which is enriched on the surface of cancer cells, such as EpCAM, FOLR1, and Fibronectin.

[0194] In embodiments, the fusion protein can contain an IL-2 polypeptide. The fusion protein containing an IL-2 polypeptide can comprise or consist of the amino acid sequence of any one of SEQ ID NOs. 257-300, 302-317, 325-353, 355-365, 366, 372-381, 383-385, 388-420, 579-608 and 636-646. The fusion proteins disclosed as SEQ ID NOs. 257-300, 302-317, 325-353, 355-365, 366, 372-381, 383-385, 388-420, 579-608, and 636-646 are also referred to herein as ACP289-ACP292, ACP296-ACP302, WW0301, ACP304-ACP306, ACP309-ACP313, WW0353, ACP414, ACP336-ACP398, WW0472-WW0477, ACP406-ACP426, ACP439-ACP447, ACP451-ACP471, WW0729, WW0734-WW0792, ACP101, ACP293-ACP295, ACP316-ACP335, ACP427-ACP438, and ACP448-ACP450. For example, the fusion protein can comprise the amino acid sequence of SEQ ID NO: 272. The fusion protein can comprise the amino acid sequence of SEQ ID NO: 286. The fusion protein can comprise the amino acid sequence of SEQ ID NO:362. The fusion protein can comprise the amino acid sequence of SEQ ID NO:336. The fusion protein can comprise the amino acid sequence of SEQ ID NO: 348. The fusion protein can comprise the amino acid sequence of SEQ ID NO: 363. The fusion protein can comprise the amino acid sequence of SEQ ID NO: 580.

[0195] In embodiments, the fusion protein can contain an IL-12 polypeptide. The fusion protein containing an IL-12 polypeptide can comprise or consist of the amino acid sequence of any one of SEQ ID NOs. 368-371, 434-440, 453-519, or 523-538. The fusion proteins disclosed as SEQ ID NOs. 368-371, 434-440, 453-519, or 523-538 are referred to herein as ACP240-ACP245, ACP247, ACP285-ACP288, WW0641, WW0649-WW0652, WW0662-WW0725, WW0765-WW0772, and WW0796-WW0803. For example, the fusion protein can comprise the amino acid sequence of SEQ ID NO:459. The fusion protein can comprise the amino acid sequence of SEQ ID NO: 466. The fusion protein can comprise the amino acid sequence of SEQ ID NO: 484. The fusion protein can comprise the amino acid sequence of SEQ ID NO: 506.

[0196] In embodiments, the fusion protein contains an IFN (e.g., IFNgamma, IFNalpha, IFNbeta) polypeptide. In some examples the IFN polypeptide is an IFNalpha or an IFNbeta. The fusion protein containing an IFN polypeptide can comprise or consist of the amino acid sequence of SEQ ID NOs. 421-430, and 539-578. The fusion proteins disclosed as SEQ ID NOs. 421-430, and 539-578 can be referred to herein as ACP200-ACP209, WW0644-WW0648, WW0781-WW0786, WW0815-WW0822, WW0831-WW0834, WW0737-WW0748, and WW0787-WW0790. For example, the fusion protein can comprise the amino acid sequence of SEQ ID NO: 421. The fusion protein can comprise the amino acid sequence of SEQ ID NO: 428. The fusion protein can comprise the amino acid sequence of 541. The fusion protein can comprise the amino acid sequence of SEQ ID NO: 558. The fusion protein can comprise the amino acid sequence of SEQ ID NO: 577.

[0197] In some aspects, the fusion polypeptide disclosed herein can be covalently or non-covalently bonded to a second polypeptide chain. For example, a fusion polypeptide can dimerize (i.e. form a dimer) or a portion of a fusion polypeptide may associate with another polypeptide, for example, to form a functional binding site for a cytokine polypeptide or serum albumin. In certain embodiments, the second polypeptide chain and the blocking moiety on the fusion polypeptide are complementary and together form a functional binding site that has specificity for the cytokine polypeptide contained in the fusion polypeptide. Exemplary functional binding sites that can be formed by the blocking moiety of the fusion polypeptide and a complimentary second polypeptide include antigen binding sites of antibodies, such as a Fab fragment of an antibody or a portion thereof. For example, one chain of a Fab that binds the cytokine can be the blocking moiety of the fusion polypeptide, e.g., a VH-CH1, and the complementary VL-CL can be part of the second polypeptide. In such situations, the blocking moiety of the fusion protein i.e., VH-CH1 and the second polypeptide that comprises the complementary VL-CL, can associate to form a functional binding site with specificity for the cytokine polypeptide contained within the fusion protein (e.g., IL-2, IL-12, IFNalpha, IFNbeta) and attenuates cytokine polypeptide activity. At least a portion of the blocking moiety can be on the second polypeptide chain can comprise at least a portion of the blocking moiety that associates with the blocking moiety on the fusion polypeptide.

[0198] In embodiments, the fusion protein containing an IL-2 cytokine polypeptide can be bonded covalently or noncovalently to a second polypeptide chain. The second polypeptide chain can contain an antibody light chain VL-CL that comprises or consist of the amino acid sequence of SEQ ID NO: 263, 264, or 333. Such a second polypeptide can bond with a complimentary VH-CH1 polypeptide contained within the fusion protein, e.g., as contained within SEQ ID NOS: 362, 363, 325, 286, 579, 581, or 582. The second polypeptide chain disclosed as SEQ ID NOs. 263, 264, and 333 can be referred herein as WW0523 (ACP381), WW0524 (ACP382), or WW0556 (ACP414).

[0199] In embodiments, the fusion polypeptide can comprise or consist of the amino acid sequence of SEQ ID NOs. 362, 363, 325, 286, 579, 581, or 582 and the second polypeptide chain can comprise or consist of the amino acid sequence of SEQ ID NOs: 263, 264, or 333. The fusion polypeptide disclosed as SEQ ID NOs. 362, 363, 325, 286, 579, 581, or 582 can be referred to as WW0520 (ACP378), WW0521 (ACP379), WW0548 (ACP406), WW0621 (ACP457), WW0729, WW0735, or WW0736, and the second polypeptide chain disclosed as SEQ ID NOs. 263, 264, and 333 can be referred herein as WW0523 (ACP381), WW0524 (ACP382), or WW0556 (ACP414).

[0200] For example, the fusion protein can comprise or consist the amino acid sequence of SEQ ID NO: 362 and the second polypeptide chain can comprise or consist the amino acid sequence of SEQ ID NO: 263. For example, the fusion protein can comprise or consist the amino acid sequence of SEQ ID NO: 362 and the second polypeptide chain can comprise or consist the amino acid sequence of SEQ ID NO: 264. For example, the fusion protein can comprise or consist the amino acid sequence of SEQ ID NO: 362 and the second polypeptide chain can comprise or consist the amino acid sequence of SEQ ID NO: 333. For example, the fusion protein can comprise or consist of an amino acid sequence of SEQ ID NO: 363 and the second polypeptide chain can comprise or consist of an amino acid sequence of SEQ ID NO: 263. For example, the fusion protein can comprise or consist of an amino acid sequence of SEQ ID No. 363 and the second polypeptide chain can comprise or consist of an amino acid sequence of SEQ ID NO: 264. For example, the fusion protein can comprise or consist of an amino acid sequence of SEQ ID NO: 363 and the second polypeptide chain can comprise or consist of an amino acid sequence of SEQ ID NO: 333. For example, the fusion protein can comprise or consist of an amino acid sequence of SEQ ID NO: 325 and the second polypeptide chain can comprise or consist of an amino acid sequence of SEQ ID NO: 264. For example, the fusion protein can comprise or consist of an amino acid sequence of SEQ ID NO: 325 and the second polypeptide chain can comprise or consist of an amino acid sequence of SEQ ID NO: 333. For example, the fusion protein can comprise or consist of an amino acid sequence of SEQ ID NO: 325 and the second polypeptide chain can comprise or consist of an amino acid sequence of SEQ ID NO: 263. For example, the fusion protein can comprise or consist of an amino acid sequence of SEQ ID NO: 286 and the second polypeptide chain can comprise or consist of an amino acid sequence of SEQ ID NO: 263. For example, the fusion protein can comprise or consist of an amino acid sequence of SEQ ID NO: 286 and the second polypeptide chain can comprise or consist of an amino acid sequence of SEQ ID NO: 264. For example, the fusion protein can comprise or consist of an amino acid sequence of SEQ ID NO: 286, and the second polypeptide can comprise or consist of an amino acid sequence of SEW ID NO: 333. For example, the fusion protein can comprise or consist of an amino acid sequence of SEQ ID NO: 579 and the second polypeptide chain can comprise or consist of an amino acid sequence of SEQ ID NO: 263. For example, the fusion protein can comprise or consist of an amino acid sequence of SEQ ID NO: 579 and the second polypeptide chain can comprise or consist of an amino acid sequence of SEQ ID NO: 264. For example, the fusion protein can comprise or consist of an amino acid sequence of SEQ ID NO: 579 and the second polypeptide chain can comprise or consist of an amino acid sequence of SEQ ID NO: 233. For example, the fusion protein can comprise or consist of SEQ ID NO: 581 and the second polypeptide chain can comprise or consist of SEQ ID NO.: 263. For example, the fusion protein can comprise or consist of SEQ ID NO: 581 and the second polypeptide chain can comprise or consist of SEQ ID NO.: 264. For example, the fusion protein can comprise or consist of SEQ ID NO: 581 and the second polypeptide chain can comprise or consist of SEQ ID NO.: 333. For example, the fusion protein can comprise or consist of SEQ ID NO: 582 and the second polypeptide chain can comprise or consist of SEQ ID NO: 263. For example, the fusion protein can comprise or consist of SEQ ID NO: 582 and the second polypeptide chain can comprise or consist of SEQ ID NO: 264. For example, the fusion protein can comprise or consist of SEQ ID NO: 582 and the second polypeptide chain can comprise or consist of SEQ ID NO: 333.

### Methods of Treatment and Pharmaceutical Compositions

[0201] This disclosure also relates to pharmaceutical compositions that comprise one or more fusion proteins as disclosed herein, optionally in combination with another therapeutic agent, which are preferably immunomodulators or anti-cancer agents. The disclosure also relates to the use of such pharmaceutical compositions, and one or more fusion proteins, optionally in combination with another therapeutic agent in treatment of cancers.

[0202] The therapeutic combinations disclosed herein can comprise, for example, a fusion protein containing an IL-2 polypeptide, a fusion protein containing an IL-12 polypeptide, or a fusion protein containing an IFN polypeptide. Therapy can be provided using two or more fusion proteins. For example, the therapeutic combination can comprise a fusion protein containing an IL-2 polypeptide and a fusion protein containing an IL-12 polypeptide, a fusion protein containing an IL-2 polypeptide and a fusion protein containing an IFN polypeptide, a fusion protein containing an IL-12 polypeptide and a fusion protein containing an IFN polypeptide.

[0203] The therapeutic combinations disclosed herein can comprise a fusion polypeptide cytokine polypeptide [A], a blocking moiety [D], optionally a half-life extension moiety [H], and a protease-cleavable polypeptide linker, wherein the cytokine polypeptide and the blocking moiety and the optional half-life extension element when present are operably linked by the protease-cleavable polypeptide linker and the fusion polypeptide has attenuated cytokine receptor activating activity, wherein the cytokine-receptor activating activity of the fusion polypeptide is at least about 10× less than the cytokine receptor activating activity of the polypeptide that contains the cytokine polypeptide that is produced by cleavage of the protease cleavable linker. the fusion polypeptide has the formula:

[A]-[L1]-[H]-[L2]-[D] (I);

[D]-[L2]-[H]-[L1]-[A] (II);

[A]-[L1]-[D]-[L2]-[H] (III);

[H]-[L2]-[D]-[L1]-[A] (IV);

[H]-[L1]-[A]-[L2′]-[D] (V);

[D]-[L1]-[A]-[L2′]-[H] (VI);

wherein [A] is a cytokine polypeptide, [D] is a blocking moiety, [H] is a half-life extension moiety, [L1] is a protease-cleavable polypeptide linker, [L2] is an polypeptide linker that is optionally protease-cleavable, and [L2′] is a protease-cleavable polypeptide linker. The therapeutic compositions can comprise a second fusion polypeptide comprising at least one of each of: a second cytokine polypeptide [A], a blocking moiety [D]optionally a half-life extension element [H]; and a protease-cleavable polypeptide linker [L]; wherein the cytokine polypeptide and the cytokine blocking moiety and the optional half-life extension element when present are operably linked by the protease-cleavable polypeptide linker and the fusion polypeptide has attenuated cytokine receptor activating activity, wherein the cytokine-receptor activating activity of the fusion polypeptide is at least about 10× less than the cytokine receptor activating activity of the polypeptide that contains the cytokine polypeptide that is produced by cleavage of the protease cleavable linker. The second fusion polypeptide can have the formula:

[A]-[L1]-[H]-[L2]-[D] (I);

[D]-[L2]-[H]-[L1]-[A] (II);

[A]-[L1]-[D]-[L2]-[H] (III);

[H]-[L2]-[D]-[L1]-[A] (IV);

[H]-[L1]-[A]-[L2′]-[D] (V);

[D]-[L1]-[A]-[L2′]-[H] (VI);

wherein [A] is a cytokine polypeptide, [D] is a blocking moiety, [H] is a half-life extension moiety, [L1] is a protease-cleavable polypeptide linker, [L2] is an polypeptide linker that is optionally protease-cleavable, and [L2′] is a protease-cleavable polypeptide linker.

[0204] The therapeutic combinations disclosed herein can comprise a first fusion protein comprising an amino acid selected from the group consisting of SEQ ID NOs. 257-300, 302-317, 325-353, 355-365, 366, 372-381, 383-385, 388-420, 579-608, 636-646, 368-371, 434-440, 453-519, 523-538, 421-430, and 539-578 and a second fusion protein comprising an amino acid sequence selected from the group consisting of selected from the group consisting of SEQ ID NOs. 257-300, 302-317, 325-353, 355-365, 366, 372-381, 383-385, 388-420, 579-608, 636-646, 368-371, 434-440, 453-519, 523-538, 421-430, and 539-578. It is preferred that the first fusion protein and the second fusion protein are different. In some preferred embodiments, the therapeutic combination comprises a first fusion protein comprising an amino acid sequence selected from SEQ ID NO: 257-300, 302-317, 325-353, 355-365, 366, 372-381, 383-385, 388-420, 579-608, 636-646 and a second fusion protein comprising an amino acid sequence selected from SEQ ID NO: 368-371, 434-440, 453-519, 523-538, 421-430, and 539-578. In some preferred embodiments, the therapeutic combination comprises a first fusion proteins comprising an amino acid sequence selected from SEQ ID NO: 368-371, 434-440, 453-519, or 523-538 and a second fusion protein comprising an amino acid sequence selected from SEQ ID NO: 257-300, 302-317, 325-353, 355-365, 366, 372-381, 383-385, 388-420, 636-646, 579-608, 421-430, and 539-578. In some preferred embodiments, the therapeutic combination comprises a first fusion protein comprising an amino acid sequence selected from SEQ ID NO: 421-430, and 539-578 and a second fusion protein comprising an amino acid sequence selected from SEQ ID NOs. 257-300, 302-317, 325-353, 355-365, 366, 372-381, 383-385, 388-420, 579-608, 636-646, 368-371, 434-440, 453-519, 523-538, or combinations thereof.

[0205] The therapeutic combination disclosed herein can comprise a first fusion protein that is covalently or non-covalently bonded to a second polypeptide chain and a therapeutic agent. The therapeutic combination can comprise (i) a fusion polypeptide comprising an amino acid sequence selected from SEQ ID NOs. 362, 363, 325, 286, 579, 581, or 582 and a second polypeptide chain comprising the amino acid sequence of SEQ ID NOs: 263, 264, or 333, and (ii) a second therapeutic agent, wherein the second therapeutic agent is a second fusion polypeptide comprising an amino acid sequence selected from the group consisting of SEQ ID NOs. 257-300, 302-317, 325-353, 355-365, 366, 372-381, 383-385, 388-420, 579-608, 636-646, 368-371, 434-440, 453-519, 523-538, 421-430, 539-578, or combinations thereof. It is preferred that the first fusion protein and the second fusion protein are not the same.

[0206] In embodiments, the therapeutic combination can comprise an additional therapeutic agent (e.g., one, two, three, four, five, or more therapeutic agents). In embodiments, the therapeutic combination can comprise 2 or more fusion proteins and one or more therapeutic agents, preferably agents for treating cancer.

[0207] Other exemplary therapeutic agents include, but are not limited to chemotherapeutic agents (e.g., Adriamycin, Cerubidine, Bleomycin, Alkeran, Velban, Oncovin, Fluorouracil, Thiotepa, Methotrexate, Bisantrene, Noantrone, Thiguanine, Cytaribine, Procarabizine), immuno-oncology agents (e.g., anti-PD-L1, anti-CTLA4, anti-PD-1, anti-CD47, anti-GD2, VEGF inhibitor), antibody-drug conjugates, cellular therapies (e.g., CAR-T, Tell therapy), oncolytic viruses, radiation therapy and/or small molecules.

[0208] Non-limiting examples of anti-cancer agents that can be used include acivicin; aclarubicin; acodazole hydrochloride; acronine; adozelesin; aldesleukin; altretamine; ambomycin; ametantrone acetate; aminoglutethimide; amsacrine; anastrozole; anthramycin; asparaginase; asperlin; azacitidine; azetepa; azotomycin; batimastat; benzodepa; bicalutamide; bisantrene hydrochloride; bisnafide dimesylate; bizelesin; bleomycin sulfate; brequinar sodium; bropirimine; busulfan; cactinomycin; calusterone; caracemide; carbetimer, carboplatin; carmustine; carubicin hydrochloride; carzelesin; cedefingol; chlorambucil; cirolemycin; cisplatin; cladribine; crisnatol mesylate; cyclophosphamide; cytarabine; dacarbazine; dactinomycin; daunorubicin hydrochloride; decitabine; dexormaplatin; dezaguanine; dezaguanine mesylate; diaziquone; docetaxel; doxorubicin; doxorubicin hydrochloride; droloxifene; droloxifene citrate; dromostanolone propionate; duazomycin; edatrexate; eflornithine hydrochloride; elsamitrucin; enloplatin; enpromate; epipropidine; epirubicin hydrochloride; erbulozole; esorubicin hydrochloride; estramustine; estramustine phosphate sodium; etanidazole; etoposide; etoposide phosphate; etoprine; fadrozole hydrochloride; fazarabine; fenretinide; floxuridine; fludarabine phosphate; fluorouracil; flurocitabine; fosquidone; fostriecin sodium; gemcitabine; gemcitabine hydrochloride; hydroxyurea; idarubicin hydrochloride; ifosfamide; ilmofosine; interleukin II (including recombinant interleukin II, or rIL2), interferon alpha-2a; interferon alpha-2b; interferon alpha-n1 interferon alpha-n3; interferon beta-I a; interferon gamma-I b; iproplatin; irinotecan hydrochloride; lanreotide acetate; letrozole; leuprolide acetate; liarozole hydrochloride; lometrexol sodium; lomustine; losoxantrone hydrochloride; masoprocol; maytansine; mechlorethamine hydrochloride; megestrol acetate; melengestrol acetate; melphalan; menogaril; mercaptopurine; methotrexate; methotrexate sodium; metoprine; meturedepa; mitindomide; mitocarcin; mitocromin; mitogillin; mitomalcin; mitomycin; mitosper; mitotane; mitoxantrone hydrochloride; mycophenolic acid; nocodazole; nogalamycin; ormaplatin; oxisuran; paclitaxel; pegaspargase; peliomycin; pentamustine; peplomycin sulfate; perfosfamide; pipobroman; piposulfan; piroxantrone hydrochloride; plicamycin; plomestane; porfimer sodium; porfiromycin; prednimustine; procarbazine hydrochloride; puromycin; puromycin hydrochloride; pyrazofurin; riboprine; rogletimide; safingol; safingol hydrochloride; semustine; simtrazene; sparfosate sodium; sparsomycin; spirogermanium hydrochloride; spiromustine; spiroplatin; streptonigrin; streptozocin; sulofenur, talisomycin; tecogalan sodium; tegafur; teloxantrone hydrochloride; temoporfin; teniposide; teroxirone; testolactone; thiamiprine; thioguanine; thiotepa; tiazofurin; tirapazamine; toremifene citrate; trestolone acetate; triciribine phosphate; trimetrexate; trimetrexate glucuronate; triptorelin; tubulozole hydrochloride; uracil mustard; uredepa; vapreotide; verteporfin; vinblastine sulfate; vincristine sulfate; vindesine; vindesine sulfate; vinepidine sulfate; vinglycinate sulfate; vinleurosine sulfate; vinorelbine tartrate; vinzolidine sulfate; vinzolidine sulfate; vorozole; zeniplatin; zinostatin; zorubicin hydrochloride.

[0209] Accordingly, this disclosure relates to a therapeutic combination of any of the fusions proteins disclosed herein (e.g., fusion proteins that comprise an IL-2 polypeptide, and IL-12 polypeptide or an IFN polypeptide) in combination with a chemotherapeutic agent, such as Adriamycin, Cerubidine, Bleomycin, Alkeran, Velban, Oncovin, Fluorouracil, Thiotepa, Methotrexate, Bisantrene, Noantrone, Thiguanine, Cytaribine, Procarabizine. This disclosure relates to a therapeutic combination of any of the fusions proteins disclosed herein (e.g., fusion proteins that comprise an IL-2 polypeptide, and IL-12 polypeptide or an IFN polypeptide) in combination with an antibody-drug conjugate. A variety of antibody drug conjugates that are suitable for use in cancer therapy are well known and typically include an antibody that binds to a cellular antigen that is preferentially express or expressed at high levels on tumor cells, and a cytotoxic drug. This disclosure relates to a therapeutic combination of any of the fusion proteins disclosed herein (e.g., fusion proteins that comprise an IL-2 polypeptide, and IL-12 polypeptide, or an IFN polypeptide) in combination with a cellular therapy, such as CAR-T or T-cell therapy. The disclosure relates to a therapeutic combination of the fusion proteins disclosed herein (e.g., fusion proteins that comprise an IL-2 polypeptide, and IL-12 polypeptide, or an IFN polypeptide) in combination with an oncolytic virus. Exemplary oncolytic viruses include, oncolytic adenoviruses, type 1 herpes simplex virus (HSV), polioviruses, measles virus (MV), Newcastle disease virus (NDV), reoviruses, vesicular stomatitis virus (VSV), and Zika virus. This disclosure relates to a therapeutic combination of any of the fusion proteins disclosed herein (e.g., fusion proteins that comprise an IL-2 polypeptide, and IL-12 polypeptide, or an IFN polypeptide) in combination with radiation therapy, such an external beam radiation or internal therapy radiation therapy.

[0210] This disclosure relates to a therapeutic combination of any of the fusion proteins disclosed herein (e.g., fusion proteins that comprise an IL-2 polypeptide, and IL-12 polypeptide, or an IFN polypeptide) in combination with cytokines (e.g., IL-2, IL-15), signal induction inhibitors (e.g., BRAF inhibitors or MEK inhibitors), checkpoint inhibitors (e.g., PDL-1, PD-1, CTLA-4), c-met inhibitors, kinase inhibitors (e.g., VGEF inhibitors), a proteasome inhibitor, mTOR inhibitor, angiogenesis inhibitor. In embodiments, any one of the fusion proteins disclosed herein (e.g., fusion proteins that comprise an IL-2 polypeptide, and IL-12 polypeptide, or an IFN polypeptide) can be combined with an anti-PD-L1 agent or an anti-PD-1 agent. Exemplary PD-1 and/or PD-L1 inhibitors include, but are not limited to Spartalizumab, Camrelizumab, Sintilimab, Tislelizumab, Toripalimab, Dostarlimab, INCMGA00012, AMP-224, and AMP-514). In embodiments, a fusion protein comprising the amino acid sequence selected from SEQ ID NO: 257-300, 302-317, 325-353, 355-365, 366, 372-381, 383-385, 388-420, 579-608, 636-646, 368-371, 434-440, 453-519, 523-538, 421-430, and 539-578 can be combined with a check-point inhibitor, such as PDL-1, PD-1, or CTL-4.

[0211] Further provided are methods of treating a subject with or at risk of developing an of a disease or disorder, such as proliferative disease, a tumorous disease, an inflammatory disease, an immunological disorder, an autoimmune disease, an infectious disease, a viral disease, an allergic reaction, a parasitic reaction, or graft-versus-host disease. The methods disclosed herein are preferably used to treat a subject having cancer. The methods administering to a subject in need thereof an effective amount of a fusion protein as disclosed herein that is typically administered as a pharmaceutical composition. In some embodiments, the method further comprises selecting a subject with or at risk of developing such a disease or disorder. The pharmaceutical composition preferably comprises a blocked cytokine, fragment, variant, subunit, or mutein thereof that is activated at a site of inflammation or a tumor. In one embodiment, the chimeric polypeptide comprises a cytokine polypeptide, fragment or mutein thereof and a serum half-life extension element. In another embodiment, the chimeric polypeptide comprises a cytokine polypeptide, variant, subunit, fragment or mutein thereof and a blocking moiety, e.g. a steric blocking polypeptide, wherein the steric blocking polypeptide is capable of sterically blocking the activity of the cytokine polypeptide, fragment or mutein thereof. In another embodiment, the chimeric polypeptide comprises a cytokine polypeptide, fragment or mutein thereof, a blocking moiety, and a serum half-life extension element.

[0212] Inflammation is part of the complex biological response of body tissues to harmful stimuli, such as pathogens, damaged cells, or irritants, and is a protective response involving immune cells, blood vessels, and molecular mediators. The function of inflammation is to eliminate the initial cause of cell injury, clear out necrotic cells and tissues damaged from the original insult and the inflammatory process, and to initiate tissue repair. Inflammation can occur from infection, as a symptom or a disease, e.g., cancer, atherosclerosis, allergies, myopathies, HIV, obesity, or an autoimmune disease. An autoimmune disease is a chronic condition arising from an abnormal immune response to a self-antigen. Autoimmune diseases that may be treated with the polypeptides disclosed herein include but are not limited to lupus, celiac disease, diabetes mellitus type 1, Graves disease, inflammatory bowel disease, multiple sclerosis, psoriasis, rheumatoid arthritis, and systemic lupus erythematosus.

[0213] The pharmaceutical composition can comprise one or more protease-cleavable linker sequences. The linker sequence serves to provide flexibility between polypeptides, such that each polypeptide is capable of inhibiting the activity of the first polypeptide. The linker sequence can be located between any or all of the cytokine polypeptide, fragment or mutein thereof, the blocking moiety, and serum half-life extension element. Optionally, the composition comprises, two, three, four, or five linker sequences. The linker sequence, two, three, or four linker sequences can be the same or different linker sequences. In one embodiment, the linker sequence comprises GGGGS (SEQ ID NO.: 449), GSGSGS (SEQ ID NO.: 450), or G(SGGG)₂SGGT (SEQ ID NO.: 451). In another embodiment, the linker comprises a protease-cleavable sequence selected from group consisting of HSSKLQ (SEQ ID NO.: 25), GPLGVRG (SEQ ID NO.: 445), IPVSLRSG (SEQ ID NO.: 446), VPLSLYSG (SEQ ID NO.: 447), and SGESPAYYTA (SEQ ID NO.: 448).

[0214] In some embodiments, the linker is cleaved by a protease selected from the group consisting of a kallikrein, thrombin, chymase, carboxypeptidase A, cathepsin G, an elastase, PR-3, granzyme M, a calpain, a matrix metalloproteinase (MMP), a plasminogen activator, a cathepsin, a caspase, a tryptase, or a tumor cell surface protease.

[0215] Suitable linkers can be of different lengths, such as from 1 amino acid (e.g., Gly) to 20 amino acids, from 2 amino acids to 15 amino acids, from 3 amino acids to 12 amino acids, including 4 amino acids to 10 amino acids, amino acids to 9 amino acids, 6 amino acids to 8 amino acids, or 7 amino acids to 8 amino acids, and may be 1, 2, 3, 4, 5, 6, 7, 8, 9, 10, 11, 12, 13, 14, 15, 16, 17, 18, 19, 20, 21, 22, 23, 24, 25, 26, 27, 28, 29, 30, 31, 32, 33, 34, 35, 36, 37, 38, 39, 40, 41, 42, 43, 44, 45, 46, 47, 48, 49, 50, 51, 52, 53, 54, 55, 56, 57, 58, 59, or 60 amino acids.

[0216] Further provided are methods of treating a subject with or at risk of developing cancer. The methods comprise administering to the subject in need thereof an effective amount of a chimeric polypeptide (a fusion protein) as disclosed herein that is typically administered as a pharmaceutical composition. In some embodiments, the method further comprises selecting a subject with or at risk of developing cancer. The pharmaceutical composition preferably comprises a blocked cytokine, fragment or mutein thereof that is activated at a tumor site.

[0217] The methods disclosed herein can be used for any suitable cancer including, hematological malignancy, solid tumors, sarcomas, carcinomas, and other solid and non-solid tumors. Illustrative suitable cancers include, for example, acute lymphoblastic leukemia (ALL), acute myeloid leukemia (AML), adrenocortical carcinoma, anal cancer, appendix cancer, astrocytoma, basal cell carcinoma, brain tumor, bile duct cancer, bladder cancer, bone cancer, breast cancer, bronchial tumor, carcinoma of unknown primary origin, cardiac tumor, cervical cancer, chordoma, colon cancer, colorectal cancer, craniopharyngioma, ductal carcinoma, embryonal tumor, endometrial cancer, ependymoma, esophageal cancer, esthesioneuroblastoma, fibrous histiocytoma, Ewing sarcoma, eye cancer, germ cell tumor, gallbladder cancer, gastric cancer, gastrointestinal carcinoid tumor, gastrointestinal stromal tumor, gestational trophoblastic disease, glioma, head and neck cancer, hepatocellular cancer, histiocytosis, Hodgkin lymphoma, hypopharyngeal cancer, intraocular melanoma, islet cell tumor, Kaposi sarcoma, kidney cancer, Langerhans cell histiocytosis, laryngeal cancer, lip and oral cavity cancer, liver cancer, lobular carcinoma in situ, lung cancer, macroglobulinemia, malignant fibrous histiocytoma, melanoma, Merkel cell carcinoma, mesothelioma, metastatic squamous neck cancer with occult primary, midline tract carcinoma involving NUT gene, mouth cancer, multiple endocrine neoplasia syndrome, multiple myeloma, mycosis fungoides, myelodysplastic syndrome, myelodysplastic/myeloproliferative neoplasm, nasal cavity and par nasal sinus cancer, nasopharyngeal cancer, neuroblastoma, non-small cell lung cancer, oropharyngeal cancer, osteosarcoma, ovarian cancer, pancreatic cancer, papillomatosis, paraganglioma, parathyroid cancer, penile cancer, pharyngeal cancer, pheochromocytomas, pituitary tumor, pleuropulmonary blastoma, primary central nervous system lymphoma, prostate cancer, rectal cancer, renal cell cancer, renal pelvis and ureter cancer, retinoblastoma, rhabdoid tumor, salivary gland cancer, Sezary syndrome, skin cancer, small cell lung cancer, small intestine cancer, soft tissue sarcoma, spinal cord tumor, stomach cancer, T-cell lymphoma, teratoid tumor, testicular cancer, throat cancer, thymoma and thymic carcinoma, thyroid cancer, urethral cancer, uterine cancer, vaginal cancer, vulvar cancer, and Wilms tumor.

[0218] Preferably, the tumor is a solid tumor. Colon cancer, lung cancer, melanoma, sarcoma, renal cell carcinoma, and breast cancer are of particular interest.

[0219] The method can further involve the administration of one or more additional agents to treat cancer, such as one or more cytokine fusion proteins described herein, chemotherapeutic agents (e.g., Adriamycin, Cerubidine, Bleomycin, Alkeran, Velban, Oncovin, Fluorouracil, Thiotepa, Methotrexate, Bisantrene, Noantrone, Thiguanine, Cytaribine, Procarabizine), immuno-oncology agents (e.g., anti-PD-L1, anti-CTLA4, anti-PD-1, anti-CD47, anti-GD2, VEGF inhibitor), cellular therapies (e.g., CAR-T, Tell therapy), oncolytic viruses, radiation therapy and the like.

[0220] In embodiments, the fusion proteins described herein, can be administered with one or more additional cytokine fusion proteins that are inducible. For example, a fusion protein containing an IL-2 polypeptide, as described herein, may be administered with fusion protein containing an IL-12 polypeptide, an IFN polypeptide, a different IL-2 polypeptide or a combinations thereof. A fusion protein containing an IL-12 polypeptide, as described herein, may be administered with a fusion protein containing an IL-2 polypeptide, an IFN polypeptide, a different IL-12 polypeptide or a combinations thereof. A fusion protein containing an IFN polypeptide, as described herein, may be administered with a fusion protein containing an IL-2 polypeptide, an IL-12 polypeptide, an different IFN polypeptide, or a combinations thereof.

[0221] In some preferred embodiments, a first fusion protein comprising the amino acid sequence of any one of SEQ ID NOS: 257-300, 302-317, 325-353, 355-365, 366, 372-381, 383-385, 388-420, 579-608, and 636-646 can be administered with a second different fusion protein comprising an amino acid sequence of any one of SEQ ID NOs. 368-371, 434-440, 453-519, 523-538, 421-430, and 539-578. In some preferred embodiments, a first fusion proteins comprising the amino acid sequence of any one of 368-371, 434-440, 453-519, or 523-538 can be administered with a second different fusion protein comprising an amino acid sequence of any one of SEQ ID NOs. 257-300, 302-317, 325-353, 355-365, 366, 372-381, 383-385, 388-420, 579-608, 636-646, 421-430, and 539-578. In some preferred embodiments, a first fusion protein comprising the amino acid sequence of any one of SEQ ID NOs. 421-430, and 539-578 can be administered with a second different fusion protein comprising the amino acid sequence of any one of SEQ ID NOs. 257-300, 302-317, 325-353, 355-365, 366, 372-381, 383-385, 388-420, 579-608, 636-646, 368-371, 434-440, 453-519, 523-538, or combinations thereof.

[0222] Further exemplary agents that can be administered in combination with one or more inducible cytokine fusion proteins described herein include, but are not limited to cytokines (e.g., IL-2, IL-15), signal induction inhibitors (e.g., BRAF inhibitors or MEK inhibitors), checkpoint inhibitors (e.g., PDL-1, PD-1, CTLA-4), c-met inhibitors, kinase inhibitors (e.g., VGEF inhibitors), a proteasome inhibitor, mTOR inhibitor, angiogenesis inhibitor.

[0223] A preferred immuno-oncology agent is an anti-PD-L1 agent or an anti-PD-1. Exemplary PD-1 and/or PD-L1 inhibitors include, but are not limited to Spartalizumab, Camrelizumab, Sintilimab, Tislelizumab, Toripalimab, Dostarlimab, INCMGA00012, AMP-224, and AMP-514). In embodiments, a fusion protein disclosed as 257-300, 302-317, 325-353, 355-365, 366, 372-381, 383-385, 388-420, 579-608, 636-646, 368-371, 434-440, 453-519, 523-538, 421-430, and 539-578 can be administered in combination with a check-point inhibitor, such as PDL-1, PD-1, or CTL-4.

[0224] Provided herein are pharmaceutical formulations or compositions containing the chimeric polypeptides and a pharmaceutically acceptable carrier. The herein provided compositions are suitable for administration in vitro or in vivo. By pharmaceutically acceptable carrier is meant a material that is not biologically or otherwise undesirable, i.e., the material is administered to a subject without causing undesirable biological effects or interacting in a deleterious manner with the other components of the pharmaceutical formulation or composition in which it is contained. The carrier is selected to minimize degradation of the active ingredient and to minimize adverse side effects in the subject.

[0225] Suitable carriers and their formulations are described in Remington: The Science and Practice of Pharmacy, 21^{st} Edition, David B. Troy, ed., Lippicott Williams & Wilkins (2005). Typically, an appropriate amount of a pharmaceutically-acceptable salt is used in the formulation to render the formulation isotonic, although the formulate can be hypertonic or hypotonic if desired. Examples of the pharmaceutically-acceptable carriers include, but are not limited to, sterile water, saline, buffered solutions like Ringer's solution, and dextrose solution. The pH of the solution is generally about 5 to about 8 or from about 7 to 7.5. Other carriers include sustained release preparations such as semipermeable matrices of solid hydrophobic polymers containing the immunogenic polypeptides. Matrices are in the form of shaped articles, e.g., films, liposomes, or microparticles. Certain carriers may be more preferable depending upon, for instance, the route of administration and concentration of composition being administered. Carriers are those suitable for administration of the chimeric polypeptides or nucleic acid sequences encoding the chimeric polypeptides to humans or other subjects.

[0226] The pharmaceutical formulations or compositions are administered in a number of ways depending on whether local or systemic treatment is desired and on the area to be treated. The compositions are administered via any of several routes of administration, including topically, orally, parenterally, intravenously, intra-articularly, intraperitoneally, intramuscularly, subcutaneously, intracavity, transdermally, intrahepatically, intracranially, nebulization/inhalation, or by installation via bronchoscopy. In some embodiments, the compositions are administered locally (non-systemically), including intratumorally, intra-articularly, intrathecally, etc.

[0227] Preparations for parenteral administration include sterile aqueous or non-aqueous solutions, suspensions, and emulsions. Examples of non-aqueous solvents are propylene glycol, polyethylene glycol, vegetable oils such as olive oil, and injectable organic esters such as ethyl oleate. Aqueous carriers include water, alcoholic/aqueous solutions, emulsions or suspensions, including saline and buffered media. Parenteral vehicles include sodium chloride solution, Ringer's dextrose, dextrose and sodium chloride, lactated Ringer's, or fixed oils. Intravenous vehicles include fluid and nutrient replenishers, electrolyte replenishers (such as those based on Ringer's dextrose), and the like. Preservatives and other additives are optionally present such as, for example, antimicrobials, anti oxidants, chelating agents, and inert gases and the like.

[0228] Formulations for topical administration include ointments, lotions, creams, gels, drops, suppositories, sprays, liquids, and powders. Conventional pharmaceutical carriers, aqueous, powder, or oily bases, thickeners and the like are optionally necessary or desirable.

[0229] Compositions for oral administration include powders or granules, suspension or solutions in water or non-aqueous media, capsules, sachets, or tables. Thickeners, flavorings, diluents, emulsifiers, dispersing aids or binders are optionally desirable.

[0230] Optionally, the chimeric polypeptides or nucleic acid sequences encoding the chimeric polypeptides are administered by a vector. There are a number of compositions and methods which can be used to deliver the nucleic acid molecules and/or polypeptides to cells, either in vitro or in vivo via, for example, expression vectors. These methods and compositions can largely be broken down into two classes: viral based delivery systems and non-viral based delivery systems. Such methods are well known in the art and readily adaptable for use with the compositions and methods described herein. Such compositions and methods can be used to transfect or transduce cells in vitro or in vivo, for example, to produce cell lines that express and preferably secrete the encoded chimeric polypeptide or to therapeutically deliver nucleic acids to a subject. The components of the chimeric nucleic acids disclosed herein typically are operably linked in frame to encode a fusion protein.

[0231] As used herein, plasmid or viral vectors are agents that transport the disclosed nucleic acids into the cell without degradation and include a promoter yielding expression of the nucleic acid molecule and/or polypeptide in the cells into which it is delivered. Viral vectors are, for example, Adenovirus, Adeno-associated virus, herpes virus, Vaccinia virus, Polio virus, Sindbis, and other RNA viruses, including these viruses with the HIV backbone. Also preferred are any viral families which share the properties of these viruses which make them suitable for use as vectors. Retroviral vectors, in general are described by Coffin et al., Retroviruses, Cold Spring Harbor Laboratory Press (1997), which is incorporated by reference herein for the vectors and methods of making them. The construction of replication-defective adenoviruses has been described (Berkner et al., J. Virol. 61:1213-20 (1987); Massie et al., Mol. Cell. Biol. 6:2872-83 (1986); Haj-Ahmad et al., J. Virol. 57:267-74 (1986); Davidson et al., J. Virol. 61:1226-39 (1987); Zhang et al., BioTechniques 15:868-72 (1993)). The benefit and the use of these viruses as vectors is that they are limited in the extent to which they can spread to other cell types, since they can replicate within an initial infected cell, but are unable to form new infectious viral particles. Recombinant adenoviruses have been shown to achieve high efficiency after direct, in vivo delivery to airway epithelium, hepatocytes, vascular endothelium, CNS parenchyma, and a number of other tissue sites. Other useful systems include, for example, replicating and host-restricted non-replicating vaccinia virus vectors.

[0232] The provided polypeptides and/or nucleic acid molecules can be delivered via virus like particles. Virus like particles (VLPs) consist of viral protein(s) derived from the structural proteins of a virus. Methods for making and using virus like particles are described in, for example, Garcea and Gissmann, Current Opinion in Biotechnology 15:513-7 (2004).

[0233] The provided polypeptides can be delivered by subviral dense bodies (DBs). DBs transport proteins into target cells by membrane fusion. Methods for making and using DBs are described in, for example, Pepperl-Klindworth et al., Gene Therapy 10:278-84 (2003).

[0234] The provided polypeptides can be delivered by tegument aggregates. Methods for making and using tegument aggregates are described in International Publication No. WO 2006/110728.

[0235] Non-viral based delivery methods, can include expression vectors comprising nucleic acid molecules and nucleic acid sequences encoding polypeptides, wherein the nucleic acids are operably linked to an expression control sequence. Suitable vector backbones include, for example, those routinely used in the art such as plasmids, artificial chromosomes, BACs, YACs, or PACs. Numerous vectors and expression systems are commercially available from such corporations as Novagen (Madison, Wis.), Clonetech (Pal Alto, Calif.), Stratagene (La Jolla, Calif.), and Invitrogen/Life Technologies (Carlsbad, Calif.). Vectors typically contain one or more regulatory regions. Regulatory regions include, without limitation, promoter sequences, enhancer sequences, response elements, protein recognition sites, inducible elements, protein binding sequences, 5′ and 3′ untranslated regions (UTRs), transcriptional start sites, termination sequences, polyadenylation sequences, and introns. Such vectors can also be used to make the chimeric polypeptides by expression is a suitable host cell, such as CHO cells.

[0236] Preferred promoters controlling transcription from vectors in mammalian host cells may be obtained from various sources, for example, the genomes of viruses such as polyoma, Simian Virus 40 (SV40), adenovirus, retroviruses, hepatitis B virus, and most preferably cytomegalovirus (CMV), or from heterologous mammalian promoters, e.g. β-actin promoter or EF1α promoter, or from hybrid or chimeric promoters (e.g., CMV promoter fused to the β-actin promoter). Of course, promoters from the host cell or related species are also useful herein.

[0237] Enhancer generally refers to a sequence of DNA that functions at no fixed distance from the transcription start site and can be either 5′ or 3′ to the transcription unit. Furthermore, enhancers can be within an intron as well as within the coding sequence itself. They are usually between 10 and 300 base pairs (bp) in length, and they function in cis. Enhancers usually function to increase transcription from nearby promoters. Enhancers can also contain response elements that mediate the regulation of transcription. While many enhancer sequences are known from mammalian genes (globin, elastase, albumin, fetoprotein, and insulin), typically one will use an enhancer from a eukaryotic cell virus for general expression. Preferred examples are the SV40 enhancer on the late side of the replication origin, the cytomegalovirus early promoter enhancer, the polyoma enhancer on the late side of the replication origin, and adenovirus enhancers.

[0238] The promoter and/or the enhancer can be inducible (e.g. chemically or physically regulated). A chemically regulated promoter and/or enhancer can, for example, be regulated by the presence of alcohol, tetracycline, a steroid, or a metal. A physically regulated promoter and/or enhancer can, for example, be regulated by environmental factors, such as temperature and light. Optionally, the promoter and/or enhancer region can act as a constitutive promoter and/or enhancer to maximize the expression of the region of the transcription unit to be transcribed. In certain vectors, the promoter and/or enhancer region can be active in a cell type specific manner. Optionally, in certain vectors, the promoter and/or enhancer region can be active in all eukaryotic cells, independent of cell type. Preferred promoters of this type are the CMV promoter, the SV40 promoter, the β-actin promoter, the EF1a promoter, and the retroviral long terminal repeat (LTR).

[0239] The vectors also can include, for example, origins of replication and/or markers. A marker gene can confer a selectable phenotype, e.g., antibiotic resistance, on a cell. The marker product is used to determine if the vector has been delivered to the cell and once delivered is being expressed. Examples of selectable markers for mammalian cells are dihydrofolate reductase (DHFR), thymidine kinase, neomycin, neomycin analog G418, hygromycin, puromycin, and blasticidin. When such selectable markers are successfully transferred into a mammalian host cell, the transformed mammalian host cell can survive if placed under selective pressure. Examples of other markers include, for example, the E. coli lacZ gene, green fluorescent protein (GFP), and luciferase. In addition, an expression vector can include a tag sequence designed to facilitate manipulation or detection (e.g., purification or localization) of the expressed polypeptide. Tag sequences, such as GFP, glutathione 5-transferase (GST), polyhistidine, c-myc, hemagglutinin, or FLAG tag (Kodak; New Haven, Conn.) sequences typically are expressed as a fusion with the encoded polypeptide. Such tags can be inserted anywhere within the polypeptide including at either the carboxyl or amino terminus.

[0240] As used herein, the terms peptide, polypeptide, or protein are used broadly to mean two or more amino acids linked by a peptide bond. Protein, peptide, and polypeptide are also used herein interchangeably to refer to amino acid sequences. It should be recognized that the term polypeptide is not used herein to suggest a particular size or number of amino acids comprising the molecule and that a peptide of the invention can contain up to several amino acid residues or more. As used throughout, subject can be a vertebrate, more specifically a mammal (e.g. a human, horse, cat, dog, cow, pig, sheep, goat, mouse, rabbit, rat, and guinea pig), birds, reptiles, amphibians, fish, and any other animal. The term does not denote a particular age or sex. Thus, adult and newborn subjects, whether male or female, are intended to be covered. As used herein, patient or subject may be used interchangeably and can refer to a subject with a disease or disorder (e.g. cancer). The term patient or subject includes human and veterinary subjects.

[0241] A subject at risk of developing a disease or disorder can be genetically predisposed to the disease or disorder, e.g., have a family history or have a mutation in a gene that causes the disease or disorder, or show early signs or symptoms of the disease or disorder. A subject currently with a disease or disorder has one or more than one symptom of the disease or disorder and may have been diagnosed with the disease or disorder.

[0242] The methods and agents as described herein are useful for both prophylactic and therapeutic treatment. For prophylactic use, a therapeutically effective amount of the chimeric polypeptides or chimeric nucleic acid sequences encoding the chimeric polypeptides described herein are administered to a subject prior to onset (e.g., before obvious signs of cancer or inflammation) or during early onset (e.g., upon initial signs and symptoms of cancer or inflammation). Prophylactic administration can occur for several days to years prior to the manifestation of symptoms of cancer or inflammation. Prophylactic administration can be used, for example, in the preventative treatment of subjects diagnosed with a genetic predisposition to cancer. Therapeutic treatment involves administering to a subject a therapeutically effective amount of the chimeric polypeptides or nucleic acid sequences encoding the chimeric polypeptides described herein after diagnosis or development of cancer or inflammation (e.g., an autoimmune disease). Prophylactic use may also apply when a patient is undergoing a treatment, e.g., a chemotherapy, in which inflammation is expected.

[0243] According to the methods taught herein, the subject is administered an effective amount of the agent (e.g., a chimeric polypeptide). The terms effective amount and effective dosage are used interchangeably. The term effective amount is defined as any amount necessary to produce a desired physiologic response. Effective amounts and schedules for administering the agent may be determined empirically, and making such determinations is within the skill in the art. The dosage ranges for administration are those large enough to produce the desired effect in which one or more symptoms of the disease or disorder are affected (e.g., reduced or delayed). The dosage should not be so large as to cause substantial adverse side effects, such as unwanted cross-reactions, anaphylactic reactions, and the like. Generally, the dosage will vary with the age, condition, sex, type of disease, the extent of the disease or disorder, route of administration, or whether other drugs are included in the regimen, and can be determined by one of skill in the art. The dosage can be adjusted by the individual physician in the event of any contraindications. Dosages can vary and can be administered in one or more dose administrations daily, for one or several days. Guidance can be found in the literature for appropriate dosages for given classes of pharmaceutical products.

[0244] As used herein the terms treatment, treat, or treating refers to a method of reducing the effects of a disease or condition or symptom of the disease or condition. Thus, in the disclosed method, treatment can refer to a 10%, 20%, 30%, 40%, 50%, 60%, 70%, 80%, 90%, or 100% reduction in the severity of an established disease or condition or symptom of the disease or condition. For example, a method for treating a disease is considered to be a treatment if there is a 10% reduction in one or more symptoms of the disease in a subject as compared to a control. Thus, the reduction can be a 10%, 20%, 30%, 40%, 50%, 60%, 70%, 80%, 90%, 100%, or any percent reduction in between 10% and 100% as compared to native or control levels. It is understood that treatment does not necessarily refer to a cure or complete ablation of the disease, condition, or symptoms of the disease or condition.

[0245] As used herein, the terms prevent, preventing, and prevention of a disease or disorder refers to an action, for example, administration of the chimeric polypeptide or nucleic acid sequence encoding the chimeric polypeptide, that occurs before or at about the same time a subject begins to show one or more symptoms of the disease or disorder, which inhibits or delays onset or exacerbation of one or more symptoms of the disease or disorder. As used herein, references to decreasing, reducing, or inhibiting include a change of 10%, 20%, 30%, 40%, 50%, 60%, 70%, 80%, 90% or greater as compared to a control level. Such terms can include but do not necessarily include complete elimination.

[0246] IL-2 variants have been developed that are selective for IL2Rαβγ relative to IL2Rβγ (Shanafelt, A. B., et al., 2000, Nat Biotechnol.18:1197-202; Cassell, D. J., et. al., 2002, Curr Pharm Des., 8:2171-83). These variants have amino acid substitutions which reduce their affinity for IL2RB. Because IL-2 has undetectable affinity for IL2RG, these variants consequently have reduced affinity for the IL2Rβγ receptor complex and reduced ability to activate IL2Rβγ-expressing cells, but retain the ability to bind IL2RA and the ability to bind and activate the IL2Rαβγ receptor complex.

[0247] One of these variants, IL2/N88R (Bay 50-4798), was clinically tested as a low-toxicity version of IL-2 as an immune system stimulator, based on the hypothesis that IL2Rβγ-expressing NK cells are a major contributor to toxicity. Bay 50-4798 was shown to selectively stimulate the proliferation of activated T cells relative to NK cells, and was evaluated in phase I/II clinical trials in cancer patients (Margolin, K., et. al., 2007, Clin Cancer Res., 13:3312-9) and HIV patients (Davey, R. T., et. al., 2008, J Interferon Cytokine Res., 28:89-100). These clinical trials showed that Bay 50-4798 was considerably safer and more tolerable than aldesleukin, and also showed that it increased the levels of CD4+CD25+ T cells, a cell population enriched in Treg cells. Subsequent to these trials, research in the field more fully established the identity of Treg cells and demonstrated that Treg cells selectively express IL2Rαβγ (reviewed in Malek, T. R., et al., 2010, Immunity, 33:153-65).

[0248] In addition, mutants can be made that selectively alter the affinity for the CD25 chain relative to native Il-2.

[0249] IL-2 can be engineered to produce mutants that bind the IL-2R complex generally or the IL-2Rα subunit specifically with an affinity that differs from that of the corresponding wild-type IL-2 or of a presently available mutant (referred to as C125S, as the cysteine residue at position 125 is replaced with a serine residue).

[0250] Accordingly, the present invention features mutant interleukin-2 (IL-2*) polypeptides that include an amino acid sequence that is at least 80% identical to wild-type IL-2 (e.g., 85, 87, 90, 95, 97, 98, or 99% identical) and that bind, as compared to WT IL-2, with higher to the IL-2 trimeric receptor relative to the dimeric IL-2 receptor. Typically, the muteins will also bind an IL-2 receptor a subunit (IL-2Rα) with an affinity that is greater than the affinity with which wild type IL-2 binds the IL-2Rα. The amino acid sequence within mutant IL-2 polypeptides can vary from SEQ ID NO:1 (UniProtKB accession number P60568) by virtue of containing (or only containing) one or more amino acid substitutions, which may be considered conservative or non-conservative substitutions. Non-naturally occurring amino acids can also be incorporated. Alternatively, or in addition, the amino acid sequence can vary from SEQ ID NO:1 (which may be considered the “reference” sequence) by virtue of containing and addition and/or deletion of one or more amino acid residues. More specifically, the amino acid sequence can differ from that of SEQ ID NO:1 by virtue of a mutation at least one of the following positions of SEQ ID NO:1: 1, 4, 8, 9, 10, 11, 13, 15, 26, 29, 30, 31, 35, 37, 46, 48, 49, 54, 61, 64, 67, 68, 69, 71, 73, 74, 75, 76, 79, 88, 89, 90, 92, 99, 101, 103, 114, 125, 128, or 133 (or combinations thereof). As noted, as few as one of these positions may be altered, as may two, three, four, five, six, seven, eight, nine, ten, or 11 or more (including up to all) of the positions. For example, the amino acid sequence can differ from SEQ ID NO:1 at positions 69 and 74 and further at one or more of positions 30, 35, and 128. The amino acid sequence can also differ from SEQ ID NO:2 (as disclosed in U.S. Pat. No. 7,569,215, incorporated herein by reference) at one of the following sets of positions: (a) positions 64, 69, and 74; (b) positions 69, 74, and 101; (c) positions 69, 74, and 128; (d) positions 30, 69, 74, and 103; (e) positions 49, 69, 73, and 76; (f) positions 69, 74, 101, and 133; (g) positions 30, 69, 74, and 128; (h) positions 69, 74, 88, and 99; (i) positions 30, 69, 74, and 128; (j) positions 9, 11, 35, 69, and 74; (k) positions 1, 46, 49, 61, 69, and 79; (1) positions 48, 68, 71, 90, 103, and 114; (m) positions 4, 10, 11, 69, 74, 88, and 133; (n) positions 15, 30 31, 35, 48, 69, 74, and 92; (0) positions 30, 68, 69, 71, 74, 75, 76, and 90; (p) positions 30, 31, 37, 69, 73, 74, 79, and 128; (q) positions 26, 29, 30, 54, 67, 69, 74, and 92; (r) positions 8, 13, 26, 30, 35, 37, 69, 74, and 92; and (s) positions 29, 31, 35, 37, 48, 69, 71, 74, 88, and 89. Aside from mutations at these positions, the amino acid sequence of the mutant IL-2 polypeptide can otherwise be identical to SEQ ID NO:1. With respect to specific substitutions, the amino acid sequence can differ from SEQ ID NO:1 by virtue of having one or more of the following mutations: A1T, S4P, K8R, K9T, T10A, Q11R, Q13R, E15K, N26D, N29S, N305, N30D, N30T, Y31H, Y31C, K35R, T37A, T37R, M46L, K48E, K49R, K49E, K54R, E61D, K64R, E67G, E68D, V69A, N71T, N71A, N71R, A73V, Q74P, S75P, K76E, K76R, H79R, N88D, I89V, N90H, I92T, S99P, T101A, F103S, I114V, I128T, I128A, T133A, or T133N. Our nomenclature is consistent with that of the scientific literature, where the single letter code of the amino acid in the wild-type or reference sequence is followed by its position within the sequence and then by the single letter code of the amino acid with which it is replaced. Thus, A1T designates a substitution of the alanine residue a position 1 with threonine. Other mutant polypeptides within the scope of the invention include those that include a mutant of SEQ ID NO:2 having substitutions at V69 (e.g. A) and Q74 (e.g., P). For example, the amino acid sequence can include one of the following sets of mutations with respect to SEQ ID NO:2: (a) K64R, V69A, and Q74P; (b) V69A, Q74P, and T101A; (c) V69A, Q74P, and I128T; (d) N30D, V69A, Q74P, and F103S; (e) K49E, V69A, A73V, and K76E; (f) V69A, Q74P, T101A, and T133N; (g) N305, V69A, Q74P, and I128A; (h) V69A, Q74P, N88D, and S99P; (i) N305, V69A, Q74P, and I128T; (j) K9T, Q11R, K35R, V69A, and Q74P; (k) A1T, M46L, K49R, E61D, V69A, and H79R; (1) K48E, E68D, N71T, N90H, F103S, and I114V; (m) S4P, T10A, Q11R, V69A, Q74P, N88D, and T133A; (n) E15K, N30S Y31H, K35R, K48E, V69A, Q74P, and I92T; (o) N305, E68D, V69A, N71A, Q74P, S75P, K76R, and N90H; (p) N305, Y31C, T37A, V69A, A73V, Q74P, H79R, and I128T; (q) N26D, N29S, N305, K54R, E67G, V69A, Q74P, and I92T; (r) K8R, Q13R, N26D, N30T, K35R, T37R, V69A, Q74P, and I92T; and (s) N29S, Y31H, K35R, T37A, K48E, V69A, N71R, Q74P, N88D, and I89V. SEQ ID NO:2 is disclosed in U.S. Pat. No. 7,569,215, which is incorporated herein by reference as an exemplary IL-2 polypeptide sequence that can be used in the invention.

[0251] As noted above, any of the mutant IL-2 polypeptides disclosed herein can include the sequences described; they can also be limited to the sequences described and otherwise identical to SEQ ID NO:1. Moreover, any of the mutant IL-2 polypeptides described herein can optionally include a substitution of the cysteine residue at position 125 with another residue (e.g., serine) and/or can optionally include a deletion of the alanine residue at position 1 of SEQ ID NO:1.

[0252] The mutant IL-2 polypeptides disclosed herein can bind to the IL-2Rα subunit with a K_{d} of less than about 28 nM (e.g., less than about 25 nM; less than about 5 nM; about 1 nM; less than about 500 pM; or less than about 100 pM). More specifically, a mutant IL-2 polypeptide can have an affinity equilibrium constant less than 1.0 nM (e.g., about 0.8, 0.6, 0.4, or 0.2 nM). Affinity can also be expressed as a relative rate of dissociation from an IL-2Rα subunit or from an IL-2 receptor complex (e.g., a complex expressed on the surface of a cell or otherwise membrane bound). For example, the mutant IL-2 polypeptides can dissociate from, e.g., IL-2Rα, at a decreased rate relative to a wild-type polypeptide or to an IL-2 based therapeutic, e.g., IL-2*. Alternatively, affinity can be characterized as the time, or average time, an IL-2* polypeptide persists on, for example, the surface of a cell expressing an IL-2R. For example, an IL-2*polypeptide can persist on the receptor for at least about 2, 5, 10, 50, 100, or 250 times (or more).

[0253] Disclosed are materials, compositions, and components that can be used for, can be used in conjunction with, can be used in preparation for, or are products of the disclosed methods and compositions. These and other materials are disclosed herein, and it is understood that when combinations, subsets, interactions, groups, etc. of these materials are disclosed that while specific reference of each various individual and collective combinations and permutations of these compounds may not be explicitly disclosed, each is specifically contemplated and described herein. For example, if a method is disclosed and discussed and a number of modifications that can be made to a number of molecules including the method are discussed, each and every combination and permutation of the method, and the modifications that are possible are specifically contemplated unless specifically indicated to the contrary. Likewise, any subset or combination of these is also specifically contemplated and disclosed. This concept applies to all aspects of this disclosure including, but not limited to, steps in methods using the disclosed compositions. Thus, if there are a variety of additional steps that can be performed, it is understood that each of these additional steps can be performed with any specific method steps or combination of method steps of the disclosed methods, and that each such combination or subset of combinations is specifically contemplated and should be considered disclosed.

[0254] Publications cited herein and the material for which they are cited are hereby specifically incorporated by reference in their entireties.

### Examples

[0255] The following are examples of methods and compositions of the invention. It is understood that various other embodiments may be practiced, given the general description provided herein.

### Example 1: Detection of IL-2, IL-2 Mutein, IL-2Rα and IL-2R7 in Fusion Proteins by ELISA

[0256] IL-2 mutein is detected with a commercially available antibody, e.g., the anti-IL-2 monoclonal (JES6-1A12) (BD Pharmingen; San Jose, Calif.). A positive control is used to show whether the monoclonal antibody recognizes the cytokine or mutein. Antibodies against IL-2Rα and IL-2R7 chain are also used. Wells of a 96-well plate are coated with an antibody (2.5 μg/ml) in PBS. Wells are blocked with 5% non-fat milk in PBS with 0.2% Tween®20 (PBS-M-Tw) and fusion proteins are added for 1-2 hours at 37° C. After washing, an anti-IL-2 biotin-labeled antibody, e.g., JES5H4 (BD Pharmingen) is added and binding is detected using Strepavidin HRP (Southern Biotechnology Associates; Birmingham, Ala.). The ELISA plate is developed by adding 50 μl O-phenylenediamine (OPD) (Sigma-Aldrich) in 0.1M Citrate pH 4.5 and 0.04% H₂O₂, stopped by adding 50 μl/well 2N H₂SO₄ and the absorbance was read at 490 nm.

### Example 2: Protease Cleavage of Fusion Protein by MMP9 Protease

[0257] One of skill in the art would be familiar with methods of setting up protein cleavage assay. 100ug of protein in 1×PBS pH 7.4 were cleaved with 1 μg active MMP9 (Sigma catalog #SAE0078-50 or Enzo catalog BML-SE360) and incubated at room temperature for up to 16 hours. Digested protein is subsequently used in functional assays or stored at −80° C. prior to testing. Extent of cleavage was monitored by SDS PAGE using methods well known in the art. As shown in FIGS. 10, 13, 18A, 18B, 24B, 24C, and 27A full cleavage of the fusion proteins by MMP9 protease is seen.

### Example 3: CTLL-2 Assay

[0258] CTLL2 cells (ATCC) were plated in suspension at a concentration of 500,000 cells/well in culture media with or without 40 mg/ml human serum albumin (HSA) and stimulated with a dilution series of recombinant hIL2 or activatable hIL2 for 72 hours at 37° C. and 5% CO₂. Activity of uncleaved and cleaved activatable hIL2 was tested. Cleaved activatable hIL2 was generated by incubation with active MMP9. Cell activity was assessed using a CellTiter-Glo (Promega) luminescence-based cell viability assay.

### Example 4: Protease Cleavage of the IL-2/IL-2Ru/IL-2Ry Chimeric Polypeptide Results in Increased Accessibility to Antibodies and Biologically Active IL-2 Mutein

[0259] The IL-2 mutein fusion proteins are biochemically characterized before and after cleavage with a protease, e.g., PSA. Immunoblot analyses will show that the fusion proteins can be cleaved by PSA and that there is an increase in intensity of the predicted low molecular weight cleavage product of approximately 20 kDa reactive with an anti-IL-2 antibody after treatment of the samples with PSA. The degree of cleavage is dependent upon the amount of PSA as well as the time of incubation. Interestingly, when the fusion protein is analyzed before and after PSA treatment by ELISA, it was found that the apparent amount of IL-2 is increased after PSA cleavage. In this experiment, there is an approximately 2 or 4-fold increase in the apparent amount of IL-2 detected using this sandwich ELISA depending on the construct, suggesting that the antibody binding is partially hindered in the intact fusion protein. Aliquots of the same samples are also analyzed after PSA treatment using the CTLL-2 cell line that requires IL-2 for growth and survival and the viability of cells can be ascertained using the colorimetric MTT assay. In this assay, the more a supernatant can be diluted, the more biologically active IL-2 it contains, and there is an increase in the amount of biologically active IL-2 after PSA cleavage. The amount of IL-2 mutein increase will suggest that after PSA cleavage there is an increase in the predicted low molecular weight cleavage fragment of approximately 20 kDa reactive with an anti-IL-2 antibody, an increase in antibody accessibility, and most importantly, an increase in the amount of biologically active IL-2 mutein.

### Example 5. In Vivo Delivery of a Protease Activated Fusion Protein Results in Decreased Tumor Growth

[0260] The chimeric polypeptide is examined to determine if it could have biological effects in vivo. For these experiments a system is used in which tumor cells injected intraperitoneally rapidly and preferentially attach and grow initially on the milky spots, a series of organized immune aggregates found on the omentum (Gerber et al., Am. J. Pathol. 169:1739-52 (2006)). This system offers a convenient way to examine the effects of fusion protein treatment on tumor growth since fusion proteins can be delivered intraperitoneally multiple times and tumor growth can be analyzed by examining the dissociated omental cells. For these experiments, the Colon 38 cell line, a rapidly growing tumor cell line that expresses both MMP2 and MMP9 in vitro, may be used. The omental tissue normally expresses a relatively small amount of MMP2 and MMP9, but, when Colon 38 tumor is present on the omentum, MMP levels increase. Using this tumor model, the ability of IL-2 mutein fusion proteins to affect tumor growth is examined. Colon 38 cells are injected intraperitoneally, allowed to attach and grow for 1 day, and then treated daily with fusion protein interaperitoneally. At day 7, the animals are sacrificed and the omenta examined for tumor growth using flow cytometry and by a colony-forming assay.

### Example 6: Construction of an Exemplary Activatable IL2 Protein Targeting CD20 Generation of an Activatable IL2 Domain

[0261] An IL-2 polypeptide capable of binding to CD20 polypeptide present in a tumor or on a tumor cell is produced as follows. A nucleic acid is produced that contains nucleic acid sequences: (1) encoding an IFN7 polypeptide sequence and (2) one or more polypeptide linkers. Activatable interleukin plasmid constructs can have optional Flag, His or other affinity tags, and are electroporated into HEK293 or other suitable human or mammalian cell lines and purified. Validation assays include T cell activation assays using T cells responsive to IFN7 stimulation in the presence of a protease.

Generation of a scFv CD20 Binding Domain

[0262] CD20 is one of the cell surface proteins present on B-lymphocytes. CD20 antigen is found in normal and malignant pre-B and mature B lymphocytes, including those in over 90% of B-cell non-Hodgkin's lymphomas (NHL). The antigen is absent in hematopoietic stem cells, activated B lymphocytes (plasma cells) and normal tissue. As such, several antibodies mostly of murine origin have been described: IFS, 2B8/C2B8, 2H7, and 1H4.

[0263] Human or humanized anti-CD20 antibodies are therefore used to generate scFv sequences for CD20 binding domains of an activatable interleukin protein. DNA sequences coding for human or humanized VL and VH domains are obtained, and the codons for the constructs are, optionally, optimized for expression in cells from Homo sapiens. The order in which the VL and VH domains appear in the scFv is varied (i.e., VL-VH, or VH-VL orientation), and three copies of the “G4S” (SEQ ID NO.: 449) or “G45” (SEQ ID NO.: 449) subunit (G4S)₃ (SEQ ID NO.: 452) connect the variable domains to create the scFv domain. Anti-CD20 scFv plasmid constructs can have optional Flag, His or other affinity tags, and are electroporated into HEK293 or other suitable human or mammalian cell lines and purified. Validation assays include binding analysis by FACS, kinetic analysis using Proteon, and staining of CD20-expressing cells.

### Cloning of DNA Expression Constructs Encoding the Activatable IL2 Protein

[0264] The activatable IL2 construct with protease cleavage site domains are used to construct an activatable interleukin protein in combination with an anti-CD20 scFv domain and a serum half-life extension element (e.g., a HSA binding peptide or VH domain). For expression of an activatable interleukin protein in CHO cells, coding sequences of all protein domains are cloned into a mammalian expression vector system. In brief, gene sequences encoding the activatable interleukin domain, serum half-life extension element, and CD20 binding domain along with peptide linkers L1 and L2 are separately synthesized and subcloned. The resulting constructs are then ligated together in the order of CD20 binding domain-L1-IL2 subunit 1-L2-protease cleavage domain-L3-IL2 subunit 2-L4-anti-CD20 scFv-L5-serum half-life extension element to yield a final construct. All expression constructs are designed to contain coding sequences for an N-terminal signal peptide and a C-terminal hexahistidine (6×His)-tag (SEQ ID NO. 354) to facilitate protein secretion and purification, respectively.

### Expression of Activatable IL2 Proteins in Stably Transfected CHO Cells

[0265] A CHO cell expression system (Flp-In®, Life Technologies), a derivative of CHO-K1 Chinese Hamster ovary cells (ATCC, CCL-61) (Kao and Puck, Proc. Natl. Acad Sci USA 1968; 60(4):1275-81), is used. Adherent cells are subcultured according to standard cell culture protocols provided by Life Technologies.

[0266] For adaption to growth in suspension, cells are detached from tissue culture flasks and placed in serum-free medium. Suspension-adapted cells are cryopreserved in medium with 10% DMSO.

[0267] Recombinant CHO cell lines stably expressing secreted activatable interleukin proteins are generated by transfection of suspension-adapted cells. During selection with the antibiotic Hygromycin B viable cell densities are measured twice a week, and cells are centrifuged and resuspended in fresh selection medium at a maximal density of 0.1×10⁶ viable cells/mL. Cell pools stably expressing activatable interleukin proteins are recovered after 2-3 weeks of selection at which point cells are transferred to standard culture medium in shake flasks. Expression of recombinant secreted proteins is confirmed by performing protein gel electrophoresis or flow cytometry. Stable cell pools are cryopreserved in DMSO containing medium.

[0268] Activatable IL2 proteins are produced in 10-day fed-batch cultures of stably transfected CHO cell lines by secretion into the cell culture supernatant. Cell culture supernatants are harvested after 10 days at culture viabilities of typically >75%. Samples are collected from the production cultures every other day and cell density and viability are assessed. On day of harvest, cell culture supernatants are cleared by centrifugation and vacuum filtration before further use.

[0269] Protein expression titers and product integrity in cell culture supernatants are analyzed by SDS-PAGE.

### Purification of Activatable IL2 Proteins

[0270] Activatable IL2 proteins are purified from CHO cell culture supernatants in a two-step procedure. The constructs are subjected to affinity chromatography in a first step followed by preparative size exclusion chromatography (SEC) on Superdex 200 in a second step. Samples are buffer-exchanged and concentrated by ultrafiltration to a typical concentration of >1 mg/mL. Purity and homogeneity (typically >90%) of final samples are assessed by SDS PAGE under reducing and non-reducing conditions, followed by immunoblotting using an anti-HSA or anti idiotype antibody as well as by analytical SEC, respectively. Purified proteins are stored at aliquots at −80° C. until use.

### Example 7: Determination of Antigen Affinity by Flow Cytometry

[0271] The activatable interleukin proteins of Example 6 are tested for their binding affinities to human CD20⁺ cells and cynomolgus CD20⁺ cells.

[0272] CD20⁺ cells are incubated with 100 μL of serial dilutions of the activatable interleukin proteins of Example 1 and at least one protease. After washing three times with FACS buffer the cells are incubated with 0.1 mL of 10 μg/mL mouse monoclonal anti-idiotype antibody in the same buffer for 45 min on ice. After a second washing cycle, the cells are incubated with 0.1 mL of 15 μg/mL FITC-conjugated goat anti-mouse IgG antibodies under the same conditions as before. As a control, cells are incubated with the anti-His IgG followed by the FITC-conjugated goat anti-mouse IgG antibodies without the activatable IL2 proteins. The cells were then washed again and resuspended in 0.2 mL of FACS buffer containing 2 μg/mL propidium iodide (PI) in order to exclude dead cells. The fluorescence of 1×10⁴ living cells is measured using a Beckman-Coulter FC500 MPL flow cytometer using the MXP software (Beckman-Coulter, Krefeld, Germany) or a Millipore Guava EasyCyte flow cytometer using the Incyte software (Merck Millipore, Schwalbach, Germany). Mean fluorescence intensities of the cell samples are calculated using CXP software (Beckman-Coulter, Krefeld, Germany) or Incyte software (Merck Millipore, Schwalbach, Germany). After subtracting the fluorescence intensity values of the cells stained with the secondary and tertiary reagents alone the values are then used for calculation of the K_{D} values with the equation for one-site binding (hyperbola) of the GraphPad Prism (version 6.00 for Windows, GraphPad Software, La Jolla Calif. USA).

[0273] CD20 binding and crossreactivity are assessed on the human CD20⁺ tumor cell lines. The K_{D} ratio of crossreactivity is calculated using the K_{D} values determined on the CHO cell lines expressing either recombinant human or recombinant cynomolgus antigens.

### Example 8: Cytotoxicity Assay

[0274] The activatable interleukin protein of Example 6 is evaluated in vitro on its mediation of immune response to CD20⁺ target cells.

[0275] Fluorescence labeled CD20⁺ REC-1 cells (a Mantle cell lymphoma cell line, ATCC CRL-3004) are incubated with isolated PBMC of random donors or CB15 T-cells (standardized Tell line) as effector cells in the presence of the activatable IL2 protein of Example 5 and at least one protease. After incubation for 4 h at 37° C. in a humidified incubator, the release of the fluorescent dye from the target cells into the supernatant is determined in a spectrofluorimeter. Target cells incubated without the activatable IL2 protein of Example land target cells totally lysed by the addition of saponin at the end of the incubation serve as negative and positive controls, respectively.

[0276] Based on the measured remaining living target cells, the percentage of specific cell lysis is calculated according to the following formula: [1−(number of living targets₍ₛₐₘₚₗₑ₎/number of living targets₍ₛₚₒₙₜₐₙₑₒᵤₛ₎)]×100%. Sigmoidal dose response curves and EC₅₀ values are calculated by non linear regression/4-parameter logistic fit using the GraphPad Software. The lysis values obtained for a given antibody concentration are used to calculate sigmoidal dose-response curves by 4 parameter logistic fit analysis using the Prism software.

### Example 9: Pharmacokinetics of Activatable Interleukin Proteins

[0277] The activatable interleukin protein of Example 6 is evaluated for half-time elimination in animal studies.

[0278] The activatable IL2 protein is administered to cynomolgus monkeys as a 0.5 mg/kg bolus injection into the saphenous vein. Another cynomolgus monkey group receives a comparable IL2 construct in size, but lacking a serum half-life extension element. A third and fourth group receive an IL2 construct with serum half-life extension element and a cytokine with CD20 and serum half-life extension elements respectively, and both comparable in size to the activatable interleukin protein. Each test group consists of 5 monkeys. Serum samples are taken at indicated time points, serially diluted, and the concentration of the proteins is determined using a binding ELISA to CD20.

[0279] Pharmacokinetic analysis is performed using the test article plasma concentrations. Group mean plasma data for each test article conforms to a multi-exponential profile when plotted against the time post-dosing. The data are fit by a standard two-compartment model with bolus input and first-order rate constants for distribution and elimination phases. The general equation for the best fit of the data for i.v. administration is: c(t)=Ae^{-αt}+Be^{-βt}, where c(t) is the plasma concentration at time t, A and B are intercepts on the Y-axis, and α and β are the apparent first-order rate constants for the distribution and elimination phases, respectively. The α-phase is the initial phase of the clearance and reflects distribution of the protein into all extracellular fluid of the animal, whereas the second or β-phase portion of the decay curve represents true plasma clearance. Methods for fitting such equations are well known in the art. For example, A=D/V(α−k21)/(α−β), B=D/V(α−k21)/(α−β), and α and β (for α>β) are roots of the quadratic equation: r²+(k12+k21+k10)r+k21k10=0 using estimated parameters of V=volume of distribution, k10=elimination rate, k12=transfer rate from compartment 1 to compartment 2 and k21=transfer rate from compartment 2 to compartment 1, and D=the administered dose.

[0280] Data analysis: Graphs of concentration versus time profiles are made using KaleidaGraph (KaleidaGraph™ V. 3.09 Copyright 1986-1997. Synergy Software. Reading, Pa.). Values reported as less than reportable (LTR) are not included in the PK analysis and are not represented graphically. Pharmacokinetic parameters are determined by compartmental analysis using WinNonlin software (WinNonlin® Professional V. 3.1 WinNonlin™ Copyright 1998-1999. Pharsight Corporation. Mountain View, Calif.). Pharmacokinetic parameters are computed as described in Ritschel W A and Kearns G L, 1999, IN: Handbook Of Basic Pharmacokinetics Including Clinical Applications, 5th edition, American Pharmaceutical Assoc., Washington, D.C.

[0281] It is expected that the activatable interleukin protein of Example 5 has improved pharmacokinetic parameters such as an increase in elimination half-time as compared to proteins lacking a serum half-life extension element.

### Example 10: Xenograft Tumor Model

[0282] The activatable IL2 protein of Example 6 is evaluated in a xenograft model.

[0283] Female immune-deficient NOD/scid mice are sub-lethally irradiated (2 Gy) and subcutaneously inoculated with 4×10⁶ Ramos RA1 cells into the right dorsal flank. When tumors reach 100 to 200 mm³, animals are allocated into 3 treatment groups. Groups 2 and 3 (8 animals each) are intraperitoneally injected with 1.5×10′ activated human T-cells. Three days later, animals from Group 3 are subsequently treated with a total of 9 intravenous doses of 50 μg activatable interleukin protein of Example 1 (qdx9d). Groups 1 and 2 are only treated with vehicle. Body weight and tumor volume are determined for 30 days.

[0284] It is expected that animals treated with the activatable interleukin protein of Example 5 have a statistically significant delay in tumor growth in comparison to the respective vehicle-treated control group.

[0285] While preferred embodiments of the present invention have been shown and described herein, it will be obvious to those skilled in the art that such embodiments are provided by way of example only. Numerous variations, changes, and substitutions will now occur to those skilled in the art without departing from the invention. It should be understood that various alternatives to the embodiments of the invention described herein may be employed in practicing the invention. It is intended that the following claims define the scope of the invention and that methods and structures within the scope of these claims and their equivalents be covered thereby.

### Example 11: Mouse IFNγ WEHI Cell Survival Assay

[0286] WEHI279 cells (ATCC) were plated in suspension at a concentration of 25,000 cells/well in culture media with or without 1.5% human serum albumin (HSA) and stimulated with a dilution series of recombinant mIFNγ or inducible mIFNγ for 72 hours at 37° C. and 5% CO₂. Activity of uncleaved and cleaved inducible mIFNγ was tested. Cleaved inducible mIFNg was generated by incubation with active MMP9. Cell survival was assessed using a CellTiter-Glo (Promega) luminescence-based cell viability assay. The EC50 values for cleaved inducible mIFNg molecules were at least 100× more potent than un-cleaved inducible mIFNg molecules. As shown in FIGS. 16A-16F, greater inducibility was seen in assays wherein the culture media contained human serum albumin.

### Example 12: Mouse IFNγ B16 Reporter and Mouse IFNα/β B16 Reporter Cell Assays

[0287] B16-Blue IFN7 cells (InvivoGen) were plated at a concentration of 75,000 cells/well in culture media with or without 1.5% human serum albumin (HSA) and stimulated with a dilution series of recombinant mIFNγ or inducible mIFNγ for 24 hours at 37° C. and 5% CO₂. Activity of uncleaved and cleaved inducible mIFNγ was tested. Cleaved inducible mIFNγ was generated by incubation with active MMP9. Supernatants were harvested, and SEAP activation was assessed by adding QUANTI-Blue Reagent (InvivoGen), incubating at 37° C. for 2 hours, and measuring absorbance at 620 nm. Results are shown in FIGS. 17A-17F, 19A, 19B, 22A, 22B, 23A, 23B, and 28A-28N. This experiment was repeated with for IFNα fusion proteins using B16-Blue IFNα/β cells. The EC50 values for cleaved inducible mIFNα molecules were at least 100× more potent than un-cleaved inducible mIFNα molecules.

[0288] B16-Blue IFN-α/β cells (InvivoGen) were plated in suspension at a density of 75,000 cells/well in culture media with or without 15 mg/ml mouse serum albumin (HSA) and stimulated with a dilution series of recombinant mouse IFNα (or IFNβ) and activatable mouse IFNα (or IFNβ) for 20-24 hours at 37° C. and 5% CO₂. Activity of uncleaved and cleaved activatable IFNα (or IFNβ) was tested. Cleaved inducible IFNα (or IFNβ) was generated by incubation with active recombinant protease. Stimulation of B16-Blue IFN-α/13 cells with IFNα (or IFNβ) induces expression of Secreted Alkaline Phosphatase (SEAP) from an ISRE-ISG54-SEAP reporter. IFNα (or IFNβ) activity was assessed by quantification of SEAP activity using the reagent QUANTI-Blue (InvivoGen), a colorimetric based assay. Results are shown in FIGS. 10A-10J.

### Example 13. In Vivo Delivery of a Protease Activated Fusion Protein Results in Decreased Tumor Growth

[0289] The chimeric polypeptide is examined to determine if it could have biological effects in vivo. For these experiments a system is used in which tumor cells injected intraperitoneally rapidly and preferentially attach and grow initially on the milky spots, a series of organized immune aggregates found on the omentum (Gerber et al., Am. J. Pathol. 169:1739-52 (2006)). This system offers a convenient way to examine the effects of fusion protein treatment on tumor growth since fusion proteins can be delivered intraperitoneally multiple times and tumor growth can be analyzed by examining the dissociated omental cells. For these experiments, the Colon 38 cell line, a rapidly growing tumor cell line that expresses both MMP2 and MMP9 in vitro, may be used. The omental tissue normally expresses a relatively small amount of MMP2 and MMP9, but, when Colon 38 tumor is present on the omentum, MMP levels increase. Using this tumor model, the ability of IFN fusion proteins to affect tumor growth is examined. Colon 38 cells are injected intraperitoneally, allowed to attach and grow for 1 day, and then treated daily with fusion protein interaperitoneally. At day 7, the animals are sacrificed and the omenta examined for tumor growth using flow cytometry and by a colony-forming assay.

### Example 13b: The Chimeric Polypeptide was Examined to Determine its Biological Effects In Vivo

[0290] The MC38 cell line, a rapidly growing colon adenocarcinoma cell line that expresses MMP9 in vitro, was used. Using this tumor model, the ability of IFN7 fusion proteins to affect tumor growth was examined. MC38 cells were injected subcutaneously, allowed to grow for 10-14 days, and then treated with fusion protein twice weekly intraperitoneally for a total of four doses, at the levels shown in FIG. 21A-21C. As a comparator, wild-type mIFNγ was administered at the dose levels indicated, twice daily for 2 weeks on a 5 day on/2 day off schedule (10 total doses). Tumor growth and body weight were monitored approximately twice per week for two weeks.

### Example 14: Construction of an Exemplary IFNγ Protein Targeting CD20 Generation of an Activatable Cytokine Domain

[0291] An IFN7 polypeptide capable of binding to CD20 polypeptide present in a tumor or on a tumor cell is produced as follows. A nucleic acid is produced that contains nucleic acid sequences: (1) encoding an IFN2 polypeptide sequence and (2) one or more polypeptide linkers. Activatable IFN2 plasmid constructs can have optional Flag, His or other affinity tags, and are electroporated into HEK293 or other suitable human or mammalian cell lines and purified. Validation assays include T cell activation assays using T cells responsive to IFNγ stimulation in the presence of a protease.

Generation of a scFv CD20 Binding Domain

[0292] CD20 is one of the cell surface proteins present on B-lymphocytes. CD20 antigen is found in normal and malignant pre-B and mature B lymphocytes, including those in over 90% of B-cell non-Hodgkin's lymphomas (NHL). The antigen is absent in hematopoietic stem cells, activated B lymphocytes (plasma cells) and normal tissue. As such, several antibodies mostly of murine origin have been described: 1F5, 2B8/C2B8, 2H7, and 1H4.

[0293] Human or humanized anti-CD20 antibodies are therefore used to generate scFv sequences for CD20 binding domains of an activatable IFN7 protein. DNA sequences coding for human or humanized VL and VH domains are obtained, and the codons for the constructs are, optionally, optimized for expression in cells from Homo sapiens. The order in which the VL and VH domains appear in the scFv is varied (i.e., VL-VH, or VH-VL orientation), and three copies of the “G4S” (SEQ ID NO.: 449) or “G45” (SEQ ID NO.: 449) subunit (G4S)₃ (SEQ ID NO.: 452) connect the variable domains to create the scFv domain. Anti-CD20 scFv plasmid constructs can have optional Flag, His or other affinity tags, and are electroporated into HEK293 or other suitable human or mammalian cell lines and purified. Validation assays include binding analysis by FACS, kinetic analysis using Proteon, and staining of CD20-expressing cells.

### Cloning of DNA Expression Constructs Encoding the Activatable IFNγ Protein

[0294] The activatable IFN7 construct with protease cleavage site domains are used to construct an activatable IFN7 protein in combination with an anti-CD20 scFv domain and a serum half-life extension element (e.g., a HSA binding peptide or VH domain), with the domains organized. For expression of an activatable IFN7 protein in CHO cells, coding sequences of all protein domains are cloned into a mammalian expression vector system. In brief, gene sequences encoding the activatable IFN7 domain, serum half-life extension element, and CD20 binding domain along with peptide linkers L1 and L2 are separately synthesized and subcloned. The resulting constructs are then ligated together in the order of CD20 binding domain-L1-IFN7 subunit 1-L2-protease cleavage domain-L3-IFN7 subunit2-L4-anti-CD20 scFv-L5-serum half-life extension element to yield a final construct. All expression constructs are designed to contain coding sequences for an N-terminal signal peptide and a C-terminal hexahistidine (6×His)-tag (SEQ ID NO.: 354) to facilitate protein secretion and purification, respectively.

### Expression of Activatable IFNγ Proteins in Stably Transfected CHO Cells

[0295] A CHO cell expression system (Flp-In®, Life Technologies), a derivative of CHO-K1 Chinese Hamster ovary cells (ATCC, CCL-61) (Kao and Puck, Proc. Natl. Acad Sci USA 1968; 60(4):1275-81), is used. Adherent cells are subcultured according to standard cell culture protocols provided by Life Technologies.

[0296] For adaption to growth in suspension, cells are detached from tissue culture flasks and placed in serum-free medium. Suspension-adapted cells are cryopreserved in medium with 10% DMSO.

[0297] Recombinant CHO cell lines stably expressing secreted activatable IFN7 proteins are generated by transfection of suspension-adapted cells. During selection with the antibiotic Hygromycin B viable cell densities are measured twice a week, and cells are centrifuged and resuspended in fresh selection medium at a maximal density of 0.1×10⁶ viable cells/mL. Cell pools stably expressing activatable IFN7 proteins are recovered after 2-3 weeks of selection at which point cells are transferred to standard culture medium in shake flasks. Expression of recombinant secreted proteins is confirmed by performing protein gel electrophoresis or flow cytometry. Stable cell pools are cryopreserved in DMSO containing medium.

[0298] Activatable IFN7 proteins are produced in 10-day fed-batch cultures of stably transfected CHO cell lines by secretion into the cell culture supernatant. Cell culture supernatants are harvested after 10 days at culture viabilities of typically >75%. Samples are collected from the production cultures every other day and cell density and viability are assessed. On day of harvest, cell culture supernatants are cleared by centrifugation and vacuum filtration before further use.

[0299] Protein expression titers and product integrity in cell culture supernatants are analyzed by SDS-PAGE.

### Purification of Activatable IFNγ Proteins

[0300] Activatable IFN7 proteins are purified from CHO cell culture supernatants in a two-step procedure. The constructs are subjected to affinity chromatography in a first step followed by preparative size exclusion chromatography (SEC) on Superdex 200 in a second step. Samples are buffer-exchanged and concentrated by ultrafiltration to a typical concentration of >1 mg/mL. Purity and homogeneity (typically >90%) of final samples are assessed by SDS PAGE under reducing and non-reducing conditions, followed by immunoblotting using an anti-HSA or anti idiotype antibody as well as by analytical SEC, respectively. Purified proteins are stored at aliquots at −80° C. until use.

### Example 15: Determination of Antigen Affinity by Flow Cytometry

[0301] The activatable IFN7 proteins of Example 1 are tested for their binding affinities to human CD20⁺ cells and cynomolgus CD20⁺ cells.

[0302] CD20⁺ cells are incubated with 100 μL of serial dilutions of the activatable IFN7 proteins of Example 1 and at least one protease. After washing three times with FACS buffer the cells are incubated with 0.1 mL of 10 μg/mL mouse monoclonal anti-idiotype antibody in the same buffer for 45 min on ice. After a second washing cycle, the cells are incubated with 0.1 mL of 15 μg/mL FITC-conjugated goat anti-mouse IgG antibodies under the same conditions as before. As a control, cells are incubated with the anti-His IgG followed by the FITC-conjugated goat anti-mouse IgG antibodies without the activatable IFNγProteins. The cells were then washed again and resuspended in 0.2 mL of FACS buffer containing 2 μg/mL propidium iodide (PI) in order to exclude dead cells. The fluorescence of 1×10⁴ living cells is measured using a Beckman-Coulter FC500 MPL flow cytometer using the MXP software (Beckman-Coulter, Krefeld, Germany) or a Millipore Guava EasyCyte flow cytometer using the Incyte software (Merck Millipore, Schwalbach, Germany). Mean fluorescence intensities of the cell samples are calculated using CXP software (Beckman-Coulter, Krefeld, Germany) or Incyte software (Merck Millipore, Schwalbach, Germany). After subtracting the fluorescence intensity values of the cells stained with the secondary and tertiary reagents alone the values are then used for calculation of the K_{D} values with the equation for one-site binding (hyperbola) of the GraphPad Prism (version 6.00 for Windows, GraphPad Software, La Jolla Calif. USA).

[0303] CD20 binding and crossreactivity are assessed on the human CD20⁺ tumor cell lines. The K_{D} ratio of crossreactivity is calculated using the K_{D} values determined on the CHO cell lines expressing either recombinant human or recombinant cynomolgus antigens.

### Example 16: Cytotoxicity Assay

[0304] The activatable IFN7 protein of Example 5 is evaluated in vitro on its mediation of immune response to CD20⁺ target cells.

[0305] Fluorescence labeled CD20⁺ REC-1 cells (a Mantle cell lymphoma cell line, ATCC CRL-3004) are incubated with isolated PBMC of random donors or CB15 T-cells (standardized Tell line) as effector cells in the presence of the activatable IFN7 protein of Example 5 and at least one protease. After incubation for 4 h at 37° C. in a humidified incubator, the release of the fluorescent dye from the target cells into the supernatant is determined in a spectrofluorimeter. Target cells incubated without the activatable IFN7 protein of Example 5 and target cells totally lysed by the addition of saponin at the end of the incubation serve as negative and positive controls, respectively.

[0306] Based on the measured remaining living target cells, the percentage of specific cell lysis is calculated according to the following formula: [1−(number of living targets₍ₛₐₘₚₗₑ₎/number of living targets₍ₛₚₒₙₜₐₙₑₒᵤₛ₎)]×100%. Sigmoidal dose response curves and EC30 values are calculated by non linear regression/4-parameter logistic fit using the GraphPad Software. The lysis values obtained for a given antibody concentration are used to calculate sigmoidal dose-response curves by 4 parameter logistic fit analysis using the Prism software.

### Example 17: Pharmacokinetics of Activatable IFNγ Proteins

[0307] The activatable IFN7 protein of Example 5 is evaluated for half-time elimination in animal studies.

[0308] The activatable IFN7 protein is administered to cynomolgus monkeys as a 0.5 mg/kg bolus injection into the saphenous vein. Another cynomolgus monkey group receives a comparable cytokine in size, but lacking a serum half-life extension element. A third and fourth group receive a cytokine with serum half-life extension elements and a cytokine with CD20 and serum half-life extension elements respectively, and both comparable in size to the activatable IFN7 protein. Each test group consists of 5 monkeys. Serum samples are taken at indicated time points, serially diluted, and the concentration of the proteins is determined using a binding ELISA to CD20.

[0309] Pharmacokinetic analysis is performed using the test article plasma concentrations. Group mean plasma data for each test article conforms to a multi-exponential profile when plotted against the time post-dosing. The data are fit by a standard two-compartment model with bolus input and first-order rate constants for distribution and elimination phases. The general equation for the best fit of the data for i.v. administration is: c(t)=Ae^{-αt}+Be^{-βt}, where c(t) is the plasma concentration at time t, A and B are intercepts on the Y-axis, and α and β are the apparent fast-order rate constants for the distribution and elimination phases, respectively. The α-phase is the initial phase of the clearance and reflects distribution of the protein into all extracellular fluid of the animal, whereas the second or β-phase portion of the decay curve represents true plasma clearance. Methods for fitting such equations are well known in the art. For example, A=D/V(α−k21)/(α−β), B=D/V(β−k21)/(α−β), and α and β (for α>β) are roots of the quadratic equation: r²+(k12+k21+k10)r+k21k10=0 using estimated parameters of V=volume of distribution, k10=elimination rate, k12=transfer rate from compartment 1 to compartment 2 and k21=transfer rate from compartment 2 to compartment 1, and D=the administered dose.

[0310] Data analysis: Graphs of concentration versus time profiles are made using KaleidaGraph (KaleidaGraph™ V. 3.09 Copyright 1986-1997. Synergy Software. Reading, Pa.). Values reported as less than reportable (LTR) are not included in the PK analysis and are not represented graphically. Pharmacokinetic parameters are determined by compartmental analysis using WinNonlin software (WinNonlin® Professional V. 3.1 WinNonlin™ Copyright 1998-1999. Pharsight Corporation. Mountain View, Calif.). Pharmacokinetic parameters are computed as described in Ritschel W A and Kearns G L, 1999, IN: Handbook Of Basic Pharmacokinetics Including Clinical Applications, 5th edition, American Pharmaceutical Assoc., Washington, D.C.

[0311] It is expected that the activatable IFN7 protein of Example 5 has improved pharmacokinetic parameters such as an increase in elimination half-time as compared to proteins lacking a serum half-life extension element.

### Example 18: Xenograft Tumor Model

[0312] The activatable IFN7 protein of Example 5 is evaluated in a xenograft model.

[0313] Female immune-deficient NOD/scid mice are sub-lethally irradiated (2 Gy) and subcutaneously inoculated with 4×10⁶ Ramos RA1 cells into the right dorsal flank. When tumors reach 100 to 200 mm³, animals are allocated into 3 treatment groups. Groups 2 and 3 (8 animals each) are intraperitoneally injected with 1.5×10′ activated human T-cells. Three days later, animals from Group 3 are subsequently treated with a total of 9 intravenous doses of 50 μg activatable IFN7 protein of Example 5 (qdx9d). Groups 1 and 2 are only treated with vehicle. Body weight and tumor volume are determined for 30 days.

[0314] It is expected that animals treated with the activatable IFN7 protein of Example 5 have a statistically significant delay in tumor growth in comparison to the respective vehicle-treated control group.

[0315] While preferred embodiments of the present invention have been shown and described herein, it will be obvious to those skilled in the art that such embodiments are provided by way of example only. Numerous variations, changes, and substitutions will now occur to those skilled in the art without departing from the invention. It should be understood that various alternatives to the embodiments of the invention described herein may be employed in practicing the invention. It is intended that the following claims define the scope of the invention and that methods and structures within the scope of these claims and their equivalents be covered thereby.

### Example 19: HEK-Blue Assay

[0316] HEK-Blue IL12 cells (InvivoGen) were plated in suspension at a concentration of 50,000 cells/well in culture media with or without 15 or 40 mg/ml human serum albumin (HSA) and stimulated with a dilution series of recombinant hIL12, chimeric IL12 (mouse p35/human p40) or activatable hIL12 for 20-24 hours at 37° C. and 5% CO₂. Activity of uncleaved and cleaved activatable hIL12 was tested. Cleaved inducible hIL12 was generated by incubation with active MMP9. IL12 activity was assessed by quantification of Secreted Alkaline Phosphatase (SEAP) activity using the reagent QUANTI-Blue (InvivoGen), a colorimetric based assay. Results are shown in FIGS. 7A-7Q, 11A-11B, 12A-12F, 15A-15D, and 26A-26D.

[0317] HEK-Blue IL2 cells (InvivoGen) were plated in suspension at a concentration of 50,000 cells/well in culture media with or without 15-40 mg/ml human serum albumin (HSA) and stimulated with a dilution series of recombinant hIL2 or activatable hIL2 for 24 hours at 37° C. and 5% CO₂. Activity of uncleaved and cleaved activatable hIL2 was tested. Cleaved inducible hIL2 was generated by incubation with active MMP9. IL12 activity was assessed by quantification of Secreted Alkaline Phosphatase (SEAP) activity using the reagent QUANTI-Blue (InvivoGen), a colorimetric based assay. Exemplary results are shown in FIGS. 1A-1F and FIGS. 24A-24D.

[0318] HEK-Blue IFN-α/b cells (InvivoGen) were plated in suspension at a density of 50,000 cells/well in culture media with or without 15 mg/ml human serum albumin (HSA) and stimulated with a dilution series of recombinant human IFNα (or IFNb) and activatable human IFNα (or IFNb) for 20-24 hours at 37° C. and 5% CO₂. Activity of uncleaved and cleaved activatable IFNα (or IFNb) was tested. Cleaved inducible IFNα (or IFNb) was generated by incubation with active recombinant protease. Stimulation of HEK-Blue IFN-α/β cells with IFNα (or IFNβ) induces expression of Secreted Alkaline Phosphatase (SEAP) from an ISG54-SEAP reporter. IFNα (or IFNβ) activity was assessed by quantification of SEAP activity using the reagent QUANTI-Blue (InvivoGen), a colorimetric based assay. Results are shown in FIGS. 36A-36H.

### Example 20: Splenocyte T-Blast Assay

[0319] T-Blasts were induced from murine splenocytes with a 6-day incubation with PHA and a 24 hr incubation with recombinant hIL12. Tblasts were then plated in suspension at a concentration of 200,000 cells/well in culture media with or without 40 mg/ml human serum albumin (HSA) and stimulated with a dilution series of recombinant hIL12 or chimeric IL12 (mouse p35/human p40) or mouse IL12 for 72 hours at 37° C. and 5% CO₂. Activity of uncleaved and cleaved IL12 fusion proteins was tested. Cleaved inducible hIL12 was generated by incubation with active MMP9. IL12 activity was assessed by downstream quantification of IFNγ production using a mIFNγ alpha ELISA.

### Example 21: In Vivo Delivery of a Protease Activated Fusion Protein Results in Decreased Tumor Growth

[0320] The chimeric polypeptide is examined to determine if it could have biological effects in vivo. For these experiments a system is used in which tumor cells injected intraperitoneally rapidly and preferentially attach and grow initially on the milky spots, a series of organized immune aggregates found on the omentum (Gerber et al., Am. J. Pathol. 169:1739-52 (2006)). This system offers a convenient way to examine the effects of fusion protein treatment on tumor growth since fusion proteins can be delivered intraperitoneally multiple times and tumor growth can be analyzed by examining the dissociated omental cells. For these experiments, the Colon 38 cell line, a rapidly growing tumor cell line that expresses both MMP2 and MMP9 in vitro, may be used. The omental tissue normally expresses a relatively small amount of MMP2 and MMP9, but, when Colon 38 tumor is present on the omentum, MMP levels increase. Using this tumor model, the ability of IL-2 mutein fusion proteins to affect tumor growth is examined. Colon 38 cells are injected intraperitoneally, allowed to attach and grow for 1 day, and then treated daily with fusion protein interaperitoneally. At day 7, the animals are sacrificed and the omenta examined for tumor growth using flow cytometry and by a colony-forming assay.

### Example 22: Construction of an Exemplary Activatable Interleukin Protein Targeting CD20 Generation of an Activatable Interleukin Domain

[0321] The human IL-12p35 chain canonical sequence is Uniprot Accession No. P29459. The human IL-12p40 chain canonical sequence is Uniprot Accession No. P29460. IL-12p35 and IL-12p40 are cloned into an expression construct. A protease cleavage site is included between the IL-12p35 and IL-12p40 domains. An IL-12 polypeptide capable of binding to CD20 polypeptide present in a tumor or on a tumor cell is produced as follows. A nucleic acid is produced that contains nucleic acid sequences: (1) encoding an IFN7 polypeptide sequence and (2) one or more polypeptide linkers. Activatable interleukin plasmid constructs can have optional Flag, His or other affinity tags, and are electroporated into HEK293 or other suitable human or mammalian cell lines and purified. Validation assays include T cell activation assays using T cells responsive to IL-12 stimulation in the presence of a protease.

Generation of a scFv CD20 Binding Domain

[0322] CD20 is one of the cell surface proteins present on B-lymphocytes. CD20 antigen is found in normal and malignant pre-B and mature B lymphocytes, including those in over 90% of B-cell non-Hodgkin's lymphomas (NHL). The antigen is absent in hematopoietic stem cells, activated B lymphocytes (plasma cells) and normal tissue. As such, several antibodies mostly of murine origin have been described: IFS, 2B8/C2B8, 2H7, and 1H4.

[0323] Human or humanized anti-CD20 antibodies are therefore used to generate scFv sequences for CD20 binding domains of an activatable interleukin protein. DNA sequences coding for human or humanized VL and VH domains are obtained, and the codons for the constructs are, optionally, optimized for expression in cells from Homo sapiens. The order in which the VL and VH domains appear in the scFv is varied (i.e., VL-VH, or VH-VL orientation), and three copies of the “G4S” (SEQ ID NO.: 449) or “G45” (SEQ ID NO.: 449) subunit (G4S)₃ (SEQ ID NO.: 452) connect the variable domains to create the scFv domain. Anti-CD20 scFv plasmid constructs can have optional Flag, His or other affinity tags, and are electroporated into HEK293 or other suitable human or mammalian cell lines and purified. Validation assays include binding analysis by FACS, kinetic analysis using Proteon, and staining of CD20-expressing cells.

### Cloning of DNA Expression Constructs Encoding the Activatable Interleukin Protein

[0324] The activatable interleukin construct with protease cleavage site domains are used to construct an activatable interleukin protein in combination with an anti-CD20 scFv domain and a serum half-life extension element (e.g., a HSA binding peptide or VH domain). For expression of an activatable interleukin protein in CHO cells, coding sequences of all protein domains are cloned into a mammalian expression vector system. In brief, gene sequences encoding the activatable interleukin domain, serum half-life extension element, and CD20 binding domain along with peptide linkers L1 and L2 are separately synthesized and subcloned. The resulting constructs are then ligated together in the order of CD20 binding domain-L1-IL-12p35-L2-protease cleavage domain-L3-IL-12p40-L4-anti-CD20 scFv-L5-serum half-life extension element to yield a final construct. All expression constructs are designed to contain coding sequences for an N-terminal signal peptide and a C-terminal hexahistidine (6×His)-tag (SEQ ID NO.: 354) to facilitate protein secretion and purification, respectively.

### Expression of Activatable Interleukin Proteins in Stably Transfected CHO Cells

[0325] A CHO cell expression system (Flp-In®, Life Technologies), a derivative of CHO-K1 Chinese Hamster ovary cells (ATCC, CCL-61) (Kao and Puck, Proc. Natl. Acad Sci USA 1968; 60(4):1275-81), is used. Adherent cells are subcultured according to standard cell culture protocols provided by Life Technologies.

[0326] For adaption to growth in suspension, cells are detached from tissue culture flasks and placed in serum-free medium. Suspension-adapted cells are cryopreserved in medium with 10% DMSO.

[0327] Recombinant CHO cell lines stably expressing secreted activatable interleukin proteins are generated by transfection of suspension-adapted cells. During selection with the antibiotic Hygromycin B viable cell densities are measured twice a week, and cells are centrifuged and resuspended in fresh selection medium at a maximal density of 0.1×10⁶ viable cells/mL. Cell pools stably expressing activatable interleukin proteins are recovered after 2-3 weeks of selection at which point cells are transferred to standard culture medium in shake flasks. Expression of recombinant secreted proteins is confirmed by performing protein gel electrophoresis or flow cytometry. Stable cell pools are cryopreserved in DMSO containing medium.

[0328] Activatable interleukin proteins are produced in 10-day fed-batch cultures of stably transfected CHO cell lines by secretion into the cell culture supernatant. Cell culture supernatants are harvested after 10 days at culture viabilities of typically >75%. Samples are collected from the production cultures every other day and cell density and viability are assessed. On day of harvest, cell culture supernatants are cleared by centrifugation and vacuum filtration before further use.

[0329] Protein expression titers and product integrity in cell culture supernatants are analyzed by SDS-PAGE.

### Purification of Activatable Interleukin Proteins

[0330] Activatable interleukin proteins are purified from CHO cell culture supernatants in a two-step procedure. The constructs are subjected to affinity chromatography in a first step followed by preparative size exclusion chromatography (SEC) on Superdex 200 in a second step. Samples are buffer-exchanged and concentrated by ultrafiltration to a typical concentration of >1 mg/mL. Purity and homogeneity (typically >90%) of final samples are assessed by SDS PAGE under reducing and non-reducing conditions, followed by immunoblotting using an anti-HSA or anti idiotype antibody as well as by analytical SEC, respectively. Purified proteins are stored at aliquots at −80° C. until use.

### Example 23: Determination of Antigen Affinity by Flow Cytometry

[0331] The activatable interleukin proteins of Example 5 are tested for their binding affinities to human CD20⁺ cells and cynomolgus CD20⁺ cells.

[0332] CD20⁺ cells are incubated with 100 μL of serial dilutions of the activatable interleukin proteins of Example 5 and at least one protease. After washing three times with FACS buffer the cells are incubated with 0.1 mL of 10 μg/mL mouse monoclonal anti-idiotype antibody in the same buffer for 45 min on ice. After a second washing cycle, the cells are incubated with 0.1 mL of 15 μg/mL FITC-conjugated goat anti-mouse IgG antibodies under the same conditions as before. As a control, cells are incubated with the anti-His IgG followed by the FITC-conjugated goat anti-mouse IgG antibodies without the activatable interleukin proteins. The cells were then washed again and resuspended in 0.2 mL of FACS buffer containing 2 μg/mL propidium iodide (PI) in order to exclude dead cells. The fluorescence of 1×10⁴ living cells is measured using a Beckman-Coulter FC500 MPL flow cytometer using the MXP software (Beckman-Coulter, Krefeld, Germany) or a Millipore Guava EasyCyte flow cytometer using the Incyte software (Merck Millipore, Schwalbach, Germany). Mean fluorescence intensities of the cell samples are calculated using CXP software (Beckman-Coulter, Krefeld, Germany) or Incyte software (Merck Millipore, Schwalbach, Germany). After subtracting the fluorescence intensity values of the cells stained with the secondary and tertiary reagents alone the values are then used for calculation of the K_{D} values with the equation for one-site binding (hyperbola) of the GraphPad Prism (version 6.00 for Windows, GraphPad Software, La Jolla Calif. USA).

[0333] CD20 binding and crossreactivity are assessed on the human CD20⁺ tumor cell lines. The K_{D} ratio of crossreactivity is calculated using the K_{D} values determined on the CHO cell lines expressing either recombinant human or recombinant cynomolgus antigens.

### Example 24: Cytotoxicity Assay

[0334] The activatable interleukin protein of Example 5 is evaluated in vitro on its mediation of immune response to CD20⁺ target cells.

[0335] Fluorescence labeled CD20⁺ REC-1 cells (a Mantle cell lymphoma cell line, ATCC CRL-3004) are incubated with isolated PBMC of random donors or CB15 T-cells (standardized Tell line) as effector cells in the presence of the activatable interleukin protein of Example 5 and at least one protease. After incubation for 4 h at 37° C. in a humidified incubator, the release of the fluorescent dye from the target cells into the supernatant is determined in a spectrofluorimeter. Target cells incubated without the activatable interleukin protein of Example Sand target cells totally lysed by the addition of saponin at the end of the incubation serve as negative and positive controls, respectively.

[0336] Based on the measured remaining living target cells, the percentage of specific cell lysis is calculated according to the following formula: [1−(number of living targets₍ₛₐₘₚₗₑ₎/number of living targets₍ₛₚₒₙₜₐₙₑₒᵤₛ₎)]×100%. Sigmoidal dose response curves and EC₅₀ values are calculated by non-linear regression/4-parameter logistic fit using the GraphPad Software. The lysis values obtained for a given antibody concentration are used to calculate sigmoidal dose-response curves by 4 parameter logistic fit analysis using the Prism software.

### Example 25: Pharmacokinetics of Activatable Interleukin Proteins

[0337] The activatable interleukin protein of Example 5 is evaluated for half-time elimination in animal studies.

[0338] The activatable interleukin protein is administered to cynomolgus monkeys as a 0.5 mg/kg bolus injection into the saphenous vein. Another cynomolgus monkey group receives a comparable cytokine in size, but lacking a serum half-life extension element. A third and fourth group receive a cytokine with serum half-life extension elements and a cytokine with CD20 and serum half-life extension elements respectively, and both comparable in size to the activatable interleukin protein. Each test group consists of 5 monkeys. Serum samples are taken at indicated time points, serially diluted, and the concentration of the proteins is determined using a binding ELISA to CD20.

[0339] Pharmacokinetic analysis is performed using the test article plasma concentrations. Group mean plasma data for each test article conforms to a multi-exponential profile when plotted against the time post-dosing. The data are fit by a standard two-compartment model with bolus input and first-order rate constants for distribution and elimination phases. The general equation for the best fit of the data for i.v. administration is: c(t)=Ae^{-αt}+Be^{-βt}, where c(t) is the plasma concentration at time t, A and B are intercepts on the Y-axis, and α and β are the apparent first-order rate constants for the distribution and elimination phases, respectively. The α-phase is the initial phase of the clearance and reflects distribution of the protein into all extracellular fluid of the animal, whereas the second or β-phase portion of the decay curve represents true plasma clearance. Methods for fitting such equations are well known in the an. For example, A=D/V(α−k21)/(α−β), B=D/V(β−k21)/(α−β), and α and β (for α>β) are roots of the quadratic equation: r²+(k12+k21+k10)r+k21k10=0 using estimated parameters of V=volume of distribution, k10=elimination rate, k12=transfer rate from compartment 1 to compartment 2 and k21=transfer rate from compartment 2 to compartment 1, and D=the administered dose.

[0340] Data analysis: Graphs of concentration versus time profiles are made using KaleidaGraph (KaleidaGraph™ V. 3.09 Copyright 1986-1997. Synergy Software. Reading, Pa.). Values reported as less than reportable (LTR) are not included in the PK analysis and are not represented graphically. Pharmacokinetic parameters are determined by compartmental analysis using WinNonlin software (WinNonlin® Professional V. 3.1 WinNonlin™ Copyright 1998-1999. Pharsight Corporation. Mountain View, Calif.). Pharmacokinetic parameters are computed as described in Ritschel W A and Kearns G L, 1999, IN: Handbook Of Basic Pharmacokinetics Including Clinical Applications, 5th edition, American Pharmaceutical Assoc., Washington, D.C.

[0341] It is expected that the activatable interleukin protein of Example 5 has improved pharmacokinetic parameters such as an increase in elimination half-time as compared to proteins lacking a serum half-life extension element.

### Example 26: Xenograft Tumor Model

[0342] The activatable interleukin protein of Example 5 is evaluated in a xenograft model.

[0343] Female immune-deficient NOD/scid mice are sub-lethally irradiated (2 Gy) and subcutaneously inoculated with 4×10⁶ Ramos RA1 cells into the right dorsal flank. When tumors reach 100 to 200 mm³, animals are allocated into 3 treatment groups. Groups 2 and 3 (8 animals each) are intraperitoneally injected with 1.5×10′ activated human T-cells. Three days later, animals from Group 3 are subsequently treated with a total of 9 intravenous doses of 50 μg activatable interleukin protein of Example 5 (qdx9d). Groups 1 and 2 are only treated with vehicle. Body weight and tumor volume are determined for 30 days.

[0344] It is expected that animals treated with the activatable interleukin protein of Example 5 have a statistically significant delay in tumor growth in comparison to the respective vehicle-treated control group.

[0345] While preferred embodiments of the present invention have been shown and described herein, it will be obvious to those skilled in the art that such embodiments are provided by way of example only. Numerous variations, changes, and substitutions will now occur to those skilled in the art without departing from the invention. It should be understood that various alternatives to the embodiments of the invention described herein may be employed in practicing the invention. It is intended that the following claims define the scope of the invention and that methods and structures within the scope of these claims and their equivalents be covered thereby.

### Example 27: MC38 Experiments

[0346] The MC38 cell line, a rapidly growing colon adenocarcinoma cell line that expresses MMP9 in vitro, was used. Using this tumor model, the ability of fusion proteins to affect tumor growth was examined.

### Example 27a MC38 IL-2POC

### Agents and Treatment:

| | | | Formulation | | | |
|---|---|---|---|---|---|---|
| Gr. | N | Agent | dose | | Route | Schedule |
| 1^{#} | 10 | Vehicle | — | | ip | biwk × 3 |
| 2 | 7 | ACP16 | 700 | μg/animal | ip | biwk × 3 |
| 3 | 7 | ACP16 | 230 | μg/animal | ip | biwk × 3 |
| 4 | 7 | ACP16 | 70 | μg/animal | ip | biwk × 3 |
| 5 | 7 | ACP16 | 55 | ug/animal | ip | biwk × 3 |
| 6 | 7 | ACP16 | 17 | μg/animal | ip | biwk × 3 |
| 7 | 7 | ACP132 | 361 | μg/animal | ip | biwk × 3 |
| 8 | 7 | ACP132 | 119 | μg/animal | ip | biwk × 3 |
| 9 | 7 | ACP132 | 36 | μg/animal | ip | biwk × 3 |
| 10 | 7 | ACP132 | 28 | μg/animal | ip | biwk × 3 |
| 11 | 7 | ACP132 | 9 | μg/animal | ip | biwk × 3 |
| 12 | 7 | ACP21 | 540 | μg/animal | ip | biwk × 3 |
| 13 | 7 | ACP21 | 177 | μg/animal | ip | biwk × 3 |
| 14 | 7 | ACP21 | 54 | μg/animal | ip | biwk × 3 |
| 15 | 7 | ACP21 | 42 | μg/animal | ip | biwk × 3 |
| 16 | 7 | ACP21 | 13 | μg/animal | ip | biwk × 3 |

^{#}ControlGrouP

### Procedures

[0348] Mice were anaesthetized with isoflurane for implant of cells to reduce the ulcerations. 308 CR female C57BL/6 mice were set up with 5×10⁵ MC38 tumor cells in 0% Matrigel sc in flank. Cell Injection Volume was 0.1 mL/mouse. Mouse age at start date was 8 to 12 weeks. Pair matches were performed when tumors reach an average size of 100-150 mm³ and begin treatment. Body weights were taken at initiation and then biweekly to the end. Caliper measurements were taken biweekly to the end. Any adverse reactions were to be reported immediately. Any individual animal with a single observation of >than 30% body weight loss or three consecutive measurements of >25% body weight loss was euthanized. Any group with a mean body weight loss of >20% or >10% mortality stopped dosing; the group was not euthanized and recovery is allowed. Within a group with >20% weight loss, individuals hitting the individual body weight loss endpoint were euthanized. If the group treatment related body weight loss is recovered to within 10% of the original weights, dosing resumed at a lower dose or less frequent dosing schedule. Exceptions to non-treatment body weight % recovery were allowed on a case-by-case basis. Endpoint was tumor growth delay (TGD). Animals were monitored individually. The endpoint of the experiment was a tumor volume of 1500 mm³ or 45 days, whichever comes first. Responders were followed longer. When the endpoint was reached, the animals are to be euthanized.

[0349] Results are shown in FIG. 35.

### Example 27b: MC38 IL-2 POC. Treatment with ACP16, ACP124 and ACP130

[0350] Agents and Treatment:

| | | | Formulation | | | |
|---|---|---|---|---|---|---|
| Gr. | N | Agent | dose | | Route | Schedule |
| 1^{#} | 12 | Vehicle | — | | ip | biwk × 2 |
| 2 | 8 | ACP16 | 4.4 | μg/animal | ip | biwk × 2 |
| 3 | 8 | ACP16 | 17 | μg/animal | ip | biwk × 2 |
| 4 | 8 | ACP16 | 70 | μg/animal | ip | biwk × 2 |
| 5 | 8 | ACP16 | 232 | μg/animal | ip | biwk × 2 |
| 6 | 8 | ACP130 | 19 | μg/animal | ip | biwk × 2 |
| 7 | 8 | ACP130 | 45 | μg/animal | ip | biwk × 2 |
| 8 | 8 | ACP130 | 180 | μg/animal | ip | biwk × 2 |
| 9 | 8 | ACP130 | 600 | μg/animal | ip | biwk × 1 |
| 12 | 8 | ACP124 | 17 | μg/animal | ip | biwk × 2 |
| 13 | 8 | ACP124 | 70 | μg/animal | ip | biwk × 2 |
| 14 | 8 | ACP124 | 230 | μg/animal | ip | biwk × 2 |
| 15 | 8 | ACP124 | 700 | μg/animal | ip | biwk × 2 |
| 16 | 8 | IL-2- | 12 | μg/animal | ip | bid × 5 then 2-day |
| | | WTI | | | | pause then bid × 5 |
| | | | | | | then 2-day pause |
| 17 | 8 | IL-2- | 36 | μg/animal | ip | bid × 5 then 2-day |
| | | WTI | | | | pause then bid × 5 |
| | | | | | | then 2-day pause |

^{#}ControlGroup

### Procedures

[0351] Mice were anaesthetized with isoflurane for implant of cells to reduce the ulcerations. 308 CR female C57BL/6 mice were set up with 5×10⁵ MC38 tumor cells in 0% Matrigel sc in flank. Cell Injection Volume was 0.1 mL/mouse. Mouse age at start date was 8 to 12 weeks. Pair matches were performed when tumors reach an average size of 100-150 mm³ and begin treatment. Body weights were taken at initiation and then biweekly to the end. Caliper measurements were taken biweekly to the end. Any adverse reactions were to be reported immediately. Any individual animal with a single observation of >than 30% body weight loss or three consecutive measurements of >25% body weight loss was euthanized. Any group with a mean body weight loss of >20% or >10% mortality stopped dosing; the group was not euthanized and recovery is allowed. Within a group with >20% weight loss, individuals hitting the individual body weight loss endpoint were euthanized. If the group treatment related body weight loss is recovered to within 10% of the original weights, dosing resumed at a lower dose or less frequent dosing schedule. Exceptions to non-treatment body weight % recovery were allowed on a case-by-case basis. Endpoint was tumor growth delay (TGD). Animals were monitored individually. The endpoint of the experiment was a tumor volume of 1500 mm³ or 45 days, whichever comes first. Responders were followed longer. When the endpoint was reached, the animals are to be euthanized.

Results are shown in FIG. 31A-31C and FIG. 32B-32C. Survival curves are shown in FIGS. 34A-34D.

### Example 27c: MC38 IFNα and IL-12

### Agents and Treatment:

| | | | Formulation | | | |
|---|---|---|---|---|---|---|
| Gr. | N | Agent | dose | | Route | Schedule |
| 1^{#} | 12 | Vehicle | — | | ip | biwk × 3 |
| 2 | 8 | ACP11 | 17.5 | μg/animal | ip | biwk × 3 |
| 3 | 8 | ACP11 | 175 | μg/animal | ip | biwk × 3 |
| 4 | 8 | ACP11 | 525 | μg/animal | ip | biwk × 3 |
| 5 | 8 | ACP31 | 33 | μg/animal | ip | biwk × 3 |
| 6 | 8 | ACP31 | 110 | μg/animal | ip | biwk × 3 |
| 7 | 8 | ACP31 | 330 | μg/animal | ip | biwk × 3 |
| 8 | 8 | ACP131 | 1 | μg/animal | ip | bid × 5 then 2-day |
| | | | | | | pause then bid × 5 |
| | | | | | | then 2-day pause |
| 9 | 8 | ACP131 | 10 | μg/animal | ip | bid × 5 then 2-day |
| | | | | | | pause then bid × 5 |
| | | | | | | then 2-day pause |
| 10 | 8 | ACP131 | 30 | μg/animal | ip | bid × 5 then 2-day |
| | | | | | | pause then bid × 5 |
| | | | | | | then 2-day pause |
| 11 | 8 | mIFNa1- | 1 | μg/animal | ip | bid × 5 then 2-day |
| | | WTI | | | | pause then bid × 5 |
| | | | | | | then 2-day pause |
| 12 | 8 | mIFNa1- | 10 | μg/animal | ip | bid × 5 then 2-day |
| | | WTI | | | | pause then bid × 5 |
| | | | | | | then 2-day pause |
| 13 | 8 | IL-12- | 2 | μg/animal | ip | bid × 5 then 2-day |
| | | HM- | | | | pause then bid × 5 |
| | | WTI | | | | then 2-day pause |
| 14 | 8 | IL-12- | 10 | μg/animal | ip | bid × 5 then 2-day |
| | | HM- | | | | pause then bid × 5 |
| | | WTI | | | | then 2-day pause |
| 15 | 8 | ACP131 | 5 | μg/animal | itu | bid × 5 then 2-day |
| | | | | | | pause then bid × 5 |
| | | | | | | then 2-day pause |

^{#}ControlGroup

### Procedures:

[0353] Mice were anaesthetized with isoflurane for implant of cells to reduce the ulcerations. 308 CR female C57BL/6 mice were set up with 5×10⁵ MC38 tumor cells in 0% Matrigel sc in flank. Cell Injection Volume was 0.1 mL/mouse. Mouse age at start date was 8 to 12 weeks. Pair matches were performed when tumors reach an average size of 100-150 mm³ and begin treatment. Body weights were taken at initiation and then biweekly to the end. Caliper measurements were taken biweekly to the end. Any adverse reactions were to be reported immediately. Any individual animal with a single observation of >than 30% body weight loss or three consecutive measurements of >25% body weight loss was euthanized. Any group with a mean body weight loss of >20% or >10% mortality stopped dosing; the group was not euthanized and recovery is allowed. Within a group with >20% weight loss, individuals hitting the individual body weight loss endpoint were euthanized. If the group treatment related body weight loss is recovered to within 10% of the original weights, dosing resumed at a lower dose or less frequent dosing schedule. Exceptions to non-treatment body weight % recovery were allowed on a case-by-case basis. Endpoint was tumor growth delay (TGD). Animals were monitored individually. The endpoint of the experiment was a tumor volume of 1500 mm³ or 45 days, whichever comes first. Responders were followed longer. When the endpoint was reached, the animals are to be euthanized. Results are show in in FIGS. 29A-29B, and 30.

### Example 27d: Treatment with ACP16, ACP132, and ACP21

### Agents and Treatment:

| | | | Formulation | | | |
|---|---|---|---|---|---|---|
| Gr. | N | Agent | dose | | Route | Schedule |
| 1^{#} | 10 | Vehicle | — | | ip | biwk × 2 |
| 2 | 7 | ACP16 | 17 | μg/animal | ip | biwk × 2 |
| 3 | 7 | ACP16 | 55 | μg/animal | ip | biwk × 2 |
| 4 | 7 | ACP16 | 70 | μg/animal | ip | biwk × 2 |
| 5 | 7 | ACP16 | 230 | μg/animal | ip | biwk × 2 |
| 6 | 7 | ACP132 | 9 | μg/animal | ip | biwk × 2 |
| 7 | 7 | ACP132 | 28 | μg/animal | ip | biwk × 1 |
| 8 | 7 | ACP132 | 36 | μg/animal | ip | biwk × 1 |
| 9 | 7 | ACP132 | 119 | μg/animal | ip | biwk × 1 |
| 10 | 7 | ACP21 | 13 | μg/animal | ip | biwk × 2 |
| 11 | 7 | ACP21 | 42 | μg/animal | ip | biwk × 2 |
| 12 | 7 | ACP21 | 54 | μg/animal | ip | biwk × 2 |
| 13 | 7 | ACP21 | 177 | μg/animal | ip | biwk × 2 |

### Procedures

[0355] Mice were anaesthetized with isoflurane for implant of cells to reduce the ulcerations. CR female C57BL/6 mice were set up with 5×10⁵ MC38 tumor cells in 0% Matrigel sc in flank. Cell Injection Volume was 0.1 mL/mouse. Mouse age at start date was 8 to 12 weeks. Pair matches were performed when tumors reach an average size of 100-150 mm³ and begin treatment. ACP16 was dosed at 17, 55, 70, or 230 μg/animal; ACP132 was dosed at 9, 28, 36, or 119ug/animal; ACP21 was dosed at 13, 42, 54, or 177 μg/animal. Body weights were taken at initiation and then biweekly to the end. Caliper measurements were taken biweekly to the end. Any adverse reactions were to be reported immediately. Any individual animal with a single observation of >than 30% body weight loss or three consecutive measurements of >25% body weight loss was euthanized. Any group with a mean body weight loss of >20% or >10% mortality stopped dosing; the group was not euthanized and recovery is allowed. Within a group with >20% weight loss, individuals hitting the individual body weight loss endpoint were euthanized. If the group treatment related body weight loss is recovered to within 10% of the original weights, dosing resumed at a lower dose or less frequent dosing schedule. Exceptions to non-treatment body weight % recovery were allowed on a case-by-case basis. Endpoint was tumor growth delay (TGD). Animals were monitored individually. The endpoint of the experiment was a tumor volume of 1500 mm³ or 45 days, whichever comes first. Responders were followed longer. When the endpoint was reached, the animals are to be euthanized. Results are shown in FIG. 35.

### Example 27e: MC38 Rechallenge

[0356] Cured mice (ACP16-treated) from Example 27b were rechallenged with tumor implantation to determine whether anti-tumor memory had been established from the initial treatments.

### Agents and Treatment:

| | | | Formulation | | | |
|---|---|---|---|---|---|---|
| Gr. | N | Agent | dose | | Route | Schedule |
| 1^{#} | 33 | No | — | | — | — |
| | | Treatment | | | | |
| 2 | 7 | ACP16 | 70 | μg/animal | ip | (ACP16 biwk × 2) |
| 3 | 8 | ACP16 | 232 | μg/animal | ip | (ACP16 biwk × 2) |
| 5 | 5 | IL-2-WTI | 12 | μg/animal | ip | (IL-2-WTI bid × 5 then |
| | | | | | | 2-day pause then bid × |
| | | | | | | 5 then 2-day pause) |
| 6 | 7 | IL-2-WTI | 36 | μg/animal | ip | (IL-2-WTI bid × 5 then |
| | | | | | | 2-day pause then bid × |
| | | | | | | 5 then 2-day pause) |

^{#}ControlGroup

### Procedures:

[0358] Mice were anaesthetized with isoflurane for implant of cells to reduce the ulcerations. This portion of the study began on the day of implant (Day 1). Group 1 consisted of 33 CR female C57BL/6 mice set up with 5×10⁵ MC38 tumor cells in 0% Matrigel subcutaneously in the flank. Groups 2-6 consisted of 33 CR female C57BL/6 mice set up with 5×10⁵ MC38 tumor cells in 0% Matrigel sc in the left flank. The tumors from the previous MC38 experiment (Example 27b) were implanted in the right flank of each animal. Cell Injection Volume was 0.1 mL/mouse. Age of control mice at initiation was 14 to 17 weeks. These mice were age matched to mice from the previous MC38 experiment (Example 27b). No dosing of active agent occurred during rechallenge. Body Weights were take biweekly until end, as were caliper measurements. Any adverse reactions or death were reported immediately. Any individual animal with a single observation of >than 30% body weight loss or three consecutive measurements of >25% body weight loss was euthanized. Endpoint was tumor growth delay (TGD). Animals were monitored individually. The endpoint of the experiment was a tumor volume of 1000 mm³ or 45 days, whichever comes first. Responders were followed longer when possible. When the endpoint is reached, the animals were euthanized. Results are shown in FIG. 33.

### Example 27f: Treatment with ACP10, ACP11

### Agents and Treatment:

| | | | Formulation | | | |
|---|---|---|---|---|---|---|
| Gr. | N | Agent | dose | | Route | Schedule |
| 1^{#} | 12 | Vehicle | — | | ip | biwk × 2 |
| 2 | 8 | ACP11 | 175 | μg/animal | ip | biwk × 2 |
| 3 | 8 | ACP11 | 300 | μg/animal | ip | biwk × 2 |
| 4 | 8 | ACP10 | 5 | μg/animal | ip | biwk × 2 |
| 5 | 8 | ACP10 | 10 | μg/animal | ip | biwk × 2 |
| 6 | 8 | ACP10 | 43 | μg/animal | ip | biwk × 2 |
| 7 | 8 | ACP10 | 43 | μg/animal | ip | qwk × 2 |
| 8 | 8 | ACP10 | 172 | μg/animal | ip | biwk × 2 |
| 9 | 8 | IL-12- | 5 | μg/animal | ip | bid for 5 days |
| | | HM-WTI | | | | first day 1 dose |
| | | | | | | then2-day pause |
| | | | | | | then bid for 5 |
| | | | | | | days firstday 1 |
| | | | | | | dose then 2-day |
| | | | | | | pause |
| 10 | 8 | IL-12- | 20 | μg/animal | ip | bid for 5 days |
| | | HM-WTI | | | | first day 1 dose |
| | | | | | | then2-day pause |
| | | | | | | then bid for 5 |
| | | | | | | days first day 1 |
| | | | | | | dose then 2-day |
| | | | | | | pause |

### Procedures

[0360] Mice were anaesthetized with isoflurane for implant of cells to reduce the ulcerations. CR female C57BL/6 mice were set up with 5×10⁵ MC38 tumor cells in 0% Matrigel sc in flank. Cell Injection Volume was 0.1 mL/mouse. Mouse age at start date was 8 to 12 weeks. Pair matches were performed when tumors reach an average size of 100-150 mm³ and begin treatment. ACP11 was dosed at 175 or 300 μg/animal; ACP10 was dosed at 5, 10, 43, or 172 ug/animal; IL-12-HM-WTI was dosed at 5 or 20 ug/animal. Body weights were taken at initiation and then biweekly to the end. Caliper measurements were taken biweekly to the end. Any adverse reactions were to be reported immediately. Any individual animal with a single observation of >than 30% body weight loss or three consecutive measurements of >25% body weight loss was euthanized. Any group with a mean body weight loss of >20% or >10% mortality stopped dosing; the group was not euthanized and recovery is allowed. Within a group with >20% weight loss, individuals hitting the individual body weight loss endpoint were euthanized. If the group treatment related body weight loss is recovered to within 10% of the original weights, dosing resumed at a lower dose or less frequent dosing schedule. Exceptions to non-treatment body weight % recovery were allowed on a case-by-case basis. Endpoint was tumor growth delay (TGD). Animals were monitored individually. The endpoint of the experiment was a tumor volume of 1500 mm³ or 45 days, whichever comes first. Responders were followed longer. When the endpoint was reached, the animals are to be euthanized. Results are shown in FIG. 45 and FIGS. 46A-46D.

### Example 27g: Treatment with ACP16, APC153, ACP155, ACP156 and ACP292

### Agents and Treatment:

| | | | Formulation | | | |
|---|---|---|---|---|---|---|
| Gr. | N | Agent | dose | | Route | Schedule |
| 1^{#} | 12 | Vehicle | — | | ip | biwk × 2 |
| 2 | 8 | ACP16 | 17 | μg/animal | ip | biwk × 2 |
| 3 | 8 | ACP16 | 55 | μg/animal | ip | biwk × 2 |
| 4 | 8 | ACP16 | 230 | μg/animal | ip | biwk × 2 |
| 5 | 8 | ACP155 | 55 | μg/animal | ip | biwk × 2 |
| 6 | 8 | ACP155 | 230 | μg/animal | ip | biwk × 2 |
| 7 | 8 | ACP153 | 55 | μg/animal | ip | biwk × 2 |
| 8 | 8 | ACP153 | 230 | μg/animal | ip | biwk × 2 |
| 9 | 8 | ACP156 | 55 | μg/animal | ip | biwk × 2 |
| 10 | 8 | ACP156 | 230 | μg/animal | ip | biwk × 2 |
| 11 | 8 | ACP292 | 45 | μg/animal | ip | biwk × 2 |
| 12 | 8 | ACP292 | 186 | μg/animal | ip | biwk × 2 |

### Procedures

[0362] Mice were anaesthetized with isoflurane for implant of cells to reduce the ulcerations. CR female C57BL/6 mice were set up with 5×10⁵ MC38 tumor cells in 0% Matrigel sc in flank. Cell Injection Volume was 0.1 mL/mouse. Mouse age at start date was 8 to 12 weeks. Pair matches were performed when tumors reach an average size of 100-150 mm³ and begin treatment. ACP16 was dosed at 17, 55 or 230 μg/animal; ACP153, ACP155 and ACP156 were dosed at 55 or 230 μg/animal; ACP292 was dosed at 45 or 186 μg/animal. Body weights were taken at initiation and then biweekly to the end. Caliper measurements were taken biweekly to the end. Any adverse reactions were to be reported immediately. Any individual animal with a single observation of >than 30% body weight loss or three consecutive measurements of >25% body weight loss was euthanized. Any group with a mean body weight loss of >20% or >10% mortality stopped dosing; the group was not euthanized and recovery is allowed. Within a group with >20% weight loss, individuals hitting the individual body weight loss endpoint were euthanized. If the group treatment related body weight loss is recovered to within 10% of the original weights, dosing resumed at a lower dose or less frequent dosing schedule. Exceptions to non-treatment body weight % recovery were allowed on a case-by-case basis. Endpoint was tumor growth delay (TGD). Animals were monitored individually. The endpoint of the experiment was a tumor volume of 1500 mm³ or 45 days, whichever comes first. Responders were followed longer. When the endpoint was reached, the animals are to be euthanized. Results are shown in FIGS. 49A-49I.

### Example 27h: Treatment with ACP16, APC302 and ACP314

### Agents and Treatment:

| | | | Formulation | | | |
|---|---|---|---|---|---|---|
| Gr. | N | Agent | dose | | Route | Schedule |
| 1^{#} | 12 | Vehicle | — | | ip | biwk × 2 |
| 2 | 9 | ACP16 | 55 | μg/animal | ip | biwk × 2 |
| 3 | 9 | ACP16 | 230 | μg/animal | ip | biwk × 2 |
| 4 | 9 | ACP302 | 33 | μg/animal | ip | biwk × 2 |
| 5 | 9 | ACP302 | 106 | μg/animal | ip | biwk × 2 |
| 6 | 9 | ACP302 | 442 | μg/animal | ip | biwk × 2 |
| 7 | 9 | ACP302 | 1,344 | μg/animal | ip | biwk × 2 |
| 8 | 9 | ACP314 | 21 | μg/animal | ip | biwk × 2 |
| 9 | 9 | ACP314 | 68 | μg/animal | ip | biwk × 2 |
| 10 | 9 | ACP314 | 283 | μg/animal | ip | biwk × 2 |
| 11 | 9 | ACP314 | 861 | μg/animal | ip | biwk × 2 |

### Procedures

[0364] Mice were anaesthetized with isoflurane for implant of cells to reduce the ulcerations. CR female C57BL/6 mice were set up with 5×10⁵ MC38 tumor cells in 0% Matrigel sc in flank. Cell Injection Volume was 0.1 mL/mouse. Mouse age at start date was 8 to 12 weeks. Pair matches were performed when tumors reach an average size of 100-150 mm³ and begin treatment. ACP16 was dosed at 55 or 230 μg/animal; ACP302 was dosed at 33, 106, 442 or 1344 ug/animal; ACP314 was dosed at 21, 68, 283 or 861 μg/animal. Body weights were taken at initiation and then biweekly to the end. Caliper measurements were taken biweekly to the end. Any adverse reactions were to be reported immediately. Any individual animal with a single observation of >than 30% body weight loss or three consecutive measurements of >25% body weight loss was euthanized. Any group with a mean body weight loss of >20% or >10% mortality stopped dosing; the group was not euthanized and recovery is allowed. Within a group with >20% weight loss, individuals hitting the individual body weight loss endpoint were euthanized. If the group treatment related body weight loss is recovered to within 10% of the original weights, dosing resumed at a lower dose or less frequent dosing schedule. Exceptions to non-treatment body weight % recovery were allowed on a case-by-case basis. Endpoint was tumor growth delay (TGD). Animals were monitored individually. The endpoint of the experiment was a tumor volume of 1500 mm³ or 45 days, whichever comes first. Responders were followed longer. When the endpoint was reached, the animals are to be euthanized. Results are shown in FIG. 50A-50B.

### Example 27i: Treatment with ACP339

### Agents and Treatment:

| | | | Formulation | | | |
|---|---|---|---|---|---|---|
| Gr. | N | Agent | dose | | Route | Schedule |
| 1^{#} | 12 | Vehicle | — | | ip | biwk × 2 |
| 2 | 9 | ACP339 | 55 | μg/animal | ip | biwk × 2 |
| 3 | 9 | ACP339 | 230 | μg/animal | ip | biwk × 2 |
| 4 | 9 | ACP339 | 700 | μg/animal | ip | biwk × 2 |

### Procedures:

[0366] Mice were anaesthetized with isoflurane for implant of cells to reduce the ulcerations. CR female C57BL/6 mice were set up with 5×10⁵ MC38 tumor cells in 0% Matrigel sc in flank. Cell Injection Volume was 0.1 mL/mouse. Mouse age at start date was 8 to 12 weeks. Pair matches were performed when tumors reach an average size of 100-150 mm³ and begin treatment. ACP339 was dosed at 55, 230 or 700 μg/animal. Body weights were taken at initiation and then biweekly to the end. Caliper measurements were taken biweekly to the end. Any adverse reactions were to be reported immediately. Any individual animal with a single observation of >than 30% body weight loss or three consecutive measurements of >25% body weight loss was euthanized. Any group with a mean body weight loss of >20% or >10% mortality stopped dosing; the group was not euthanized and recovery is allowed. Within a group with >20% weight loss, individuals hitting the individual body weight loss endpoint were euthanized. If the group treatment related body weight loss is recovered to within 10% of the original weights, dosing resumed at a lower dose or less frequent dosing schedule. Exceptions to non-treatment body weight % recovery were allowed on a case-by-case basis. Endpoint was tumor growth delay (TGD). Animals were monitored individually. The endpoint of the experiment was a tumor volume of 1500 mm³ or 45 days, whichever comes first. Responders were followed longer. When the endpoint was reached, the animals are to be euthanized. Results are shown in FIGS. 51A-51C.

### Example 28: CT26 Experiments

[0367] The CT26 cell line, a rapidly growing colon adenocarcinoma cell line that expresses MMP9 in vitro, was used. Using this tumor model, the ability of fusion proteins to affect tumor growth was examined.

### Example 28a Treatment with ACP16 Alone or in Combination with Anti-PD1 Antibody

### Agents and Treatment:

| | | | Formulation | | |
|---|---|---|---|---|---|
| Gr. | N | Agent | dose | Route | Schedule |
| 1^{#} | 12 | vehicle 1 // | na // | ip // | days 1, 4, 8, 11 // |
| | | vehicle 2 | na | ip | days 3, 6, 10, 13 |
| 2 | 10 | vehicle 1 // | na // | ip // | days 1, 4, 8, 11 // |
| | | ACP16 | 70 μg/animal | ip | days 3, 6, 10, 13 |
| 3 | 10 | vehicle 1 // | na // | ip // | days 1, 4, 8, 11 // |
| | | ACP16 | 232 μg/animal | ip | days 3, 6, 10, 13 |
| 4 | 10 | vehicle 1 // | na // | ip // | days 1, 4, 8, 11 // |
| | | ACP16 | 500 μg/animal | ip | days 3, 6, 10, 13 |
| 5 | 10 | anti-PD-1 | 200 μg/animal // | ip // | days 1, 4, 8, 11 // |
| | | RMP1-14 // | na | ip | days 3, 6, 10, 13 |
| | | vehicle 2 | | | |
| 6 | 10 | anti-PD-1 | 200 μg/animal // | ip // | days 1, 4, 8, 11 // |
| | | RMP1-14 // | 70 μg/animal | ip | days 3, 6, 10, 13 |
| | | ACP16 | | | |
| 7 | 10 | anti-PD-1 | 200 μg/animal // | ip // | days 1, 4, 8, 11 // |
| | | RMP1-14 // | 232 μg/animal | ip | days 3, 6, 10, 13 |
| | | ACP16 | | | |
| 8 | 10 | anti-PD-1 | 200 μg/animal // | ip // | days 1, 4, 8, 11 // |
| | | RMP1-14 // | 500 μg/animal | ip | days 3, 6, 10, 13 |
| | | ACP16 | | | |
| 9 | 10 | vehicle 1 // | na // | ip // | days 1, 4, 8, 11 // |
| | | IL-2 | 12 μg/animal | ip | bid × 5 first day 1 |
| | | | | | dose per week × 2 |
| 10 | 10 | anti-PD-1 | 200 μg/animal // | ip // | days 1, 4, 8, 11 // |
| | | RMP1-14 // | 12 μg/animal | ip | bid × 5 first day 1 |
| | | IL-2 | | | dose per week × 2 |

### Procedures:

[0369] Mice were anaesthetized with isoflurane for implant of cells to reduce the ulcerations. CR female BALB/c mice were set up with 3×10⁵ CT26 tumor cells in 0% Matrigel sc in flank. Cell Injection Volume was 0.1 mL/mouse. Mouse age at start date was 8 to 12 weeks. Pair matches were performed when tumors reach an average size of 100-150 mm³ and begin treatment. ACP16 was dosed at 70, 230 or 500 μg/animal with or without anti-PD-1 antibody (RMP1-14) at 200 μg/animal. Body weights were taken at initiation and then biweekly to the end. Caliper measurements were taken biweekly to the end. Any adverse reactions were to be reported immediately. Any individual animal with a single observation of >than 30% body weight loss or three consecutive measurements of >25% body weight loss was euthanized. Any group with a mean body weight loss of >20% or >10% mortality stopped dosing; the group was not euthanized and recovery is allowed. Within a group with >20% weight loss, individuals hitting the individual body weight loss endpoint were euthanized. If the group treatment related body weight loss is recovered to within 10% of the original weights, dosing resumed at a lower dose or less frequent dosing schedule. Exceptions to non-treatment body weight % recovery were allowed on a case-by-case basis. Endpoint was tumor growth delay (TGD). Animals were monitored individually. The endpoint of the experiment was a tumor volume of 1500 mm³ or 45 days, whichever comes first. Responders were followed longer. When the endpoint was reached, the animals are to be euthanized. Results are shown in FIGS. 47A-47D and FIGS. 48A-48B.

### Example 29. Human Tblast Assay

[0370] IL-2 T-Blast Assay. Pre-stimulated T cells (T-blasts) were used to assess the activity of inducible IL-2 fusion proteins. T-Blasts were induced from human PBMCs with a 3-day incubation with PHA. Tblasts were then plated in suspension at a concentration of 50,000 or 75,000 cells/well in X-VIVO culture media (containing human serum albumin) and stimulated with a dilution series of recombinant IL-2 fusion proteins or human IL-2 for 72 hours at 37° C. and 5% CO₂. Activity of uncleaved and cleaved IL-2 fusion proteins was tested. Cleaved inducible IL-2 was generated by incubation with active MMP9. IL-2 activity was assessed measuring proliferation with CellTiter-Glo. Exemplary results are shown in FIG. 3A-3I.

[0371] IL-12 T-Blast Assay. T-Blasts were induced from human PBMCs through PHA stimulation for 72 hours. T-blasts were then washed and frozen prior use. For the assay, T-Blasts were thaw and plated in suspension at 100,000 cells/well in culture media containing human albumin and stimulated with a dilution series of recombinant hIL12 or chimeric IL12 (mouse p35/human p40) indukines or hIL12 indukines for 72 hours at 37° C. and 5% CO₂. Activity of uncleaved and cleaved IL12 fusion proteins was tested. Cleaved inducible hIL12 was generated by incubation with active MMP9 enzyme. IL12 activity was assessed by quantification of IFNγ production in supernatants using a hIFNγ Alpha-LISA kit. Exemplary results are shown in FIGS. 8A-8D.

### Example 30. Luciferase Reporter Assay

[0372] IL-2 luciferase reporter cells (Promega), purchased from the manufacturer in a “Thaw and Use” format, were plated according to the manufacturer's directions and stimulated with a dilution series of recombinant hIL-2 or activatable hIL-2 for 6 hours at 37° C. and 5% CO₂. Activity of uncleaved and cleaved activatable IL-2 was tested. Cleaved inducible IL-2 was generated by incubation with active MMP9. IL-2 activity was assessed by quantification of luciferase activity using Bio-Glo™ Reagent (Promega), which allows for the measurement of luciferase activity by luminescence readout. Results are shown in FIGS. 2A-2J.

[0373] IL12 luciferase reporter cells (Promega), purchased from the manufacturer in a “Thaw and Use” format, were plated according to the manufacturer's directions and stimulated with a dilution series of recombinant hIL12 or activatable hIL12 for 6 hours at 37° C. and 5% CO₂. Activity of uncleaved and cleaved activatable IL12 was tested. Cleaved inducible IL12 was generated by incubation with active MMP9. IL12 activity was assessed by quantification of luciferase activity using Bio-Glo™ Reagent (Promega), which allows for the measurement of luciferase activity by luminescence readout. Results are shown in FIGS. 9A-9C.

### Example 31. MC38 Experiments

[0374] Agents and Treatment

| Group | N | Agent | Dose | | Route | Schedule |
|---|---|---|---|---|---|---|
| 1 | 12 | vehicle | — | | ip | biwk × 2 |
| 2 | 8 | WW0417 | 55 | μg/animal | ip | biwk × 2 |
| 3 | 8 | WW0517 | 55 | μg/animal | ip | biwk × 2 |
| 4 | 8 | WW0517 | 230 | μg/animal | ip | biwk × 2 |
| 5 | 8 | WW0517 | 700 | μg/animal | ip | biwk × 2 |
| 6 | 8 | WWW0520/0523 | 76 | μg/animal | ip | biwk × 2 |
| 7 | 8 | WWW0520/0523 | 315 | μg/animal | ip | biwk × 2 |
| 8 | 8 | WWW0520/0523 | 959 | μg/animal | ip | biwk × 2 |
| 9 | 8 | WWW0548/0524 | 88 | μg/animal | ip | biwk × 2 |
| 10 | 8 | WWW0548/0524 | 368 | μg/animal | ip | biwk × 2 |
| 11 | 8 | WWW0548/0524 | 1,120 | μg/animal | ip | biwk × 2 |
| 12 | 8 | WWW0548/0556 | 113 | μg/animal | ip | biwk × 2 |
| 13 | 8 | WWW0548/0556 | 474 | μg/animal | ip | biwk × 2 |
| 14 | 8 | WWW0548/0556 | 1,442 | μg/animal | ip | biwk × 2 |
| 15 | 8 | WW0475 | 68 | μg/animal | ip | biwk × 2 |
| 16 | 8 | WW0475 | 283 | μg/animal | ip | biwk × 2 |
| 17 | 8 | WW0475 | 861 | μg/animal | ip | biwk × 2 |
| 10 | 8 | WW0619 | 17 | μg/animal | ip | biwk × 2 |
| 11 | 8 | WW0619 | 35 | μg/animal | ip | biwk × 2 |
| 12 | 8 | WW0619 | 70 | μg/animal | ip | biwk × 2 |
| 13 | 8 | WW0619 | 700 | μg/animal | ip | biwk × 2 |
| 14 | 8 | WW0621/0523 | 24 | μg/animal | ip | biwk × 2 |
| 15 | 8 | WW0621/0523 | 48 | μg/animal | ip | biwk × 2 |
| 16 | 8 | WW0621/0523 | 96 | μg/animal | ip | biwk × 2 |
| 17 | 8 | WW0621/0523 | 960 | μg/animal | ip | biwk × 2 |

### Procedures:

[0375] Mice were anaesthetized with isoflurane for implant of cells to reduce the ulcerations. 308 CR female C57BL/6 mice were set up with 5×10⁵ MC38 tumor cells in 0% Matrigel sc in flank. Cell Injection Volume was 0.1 mL/mouse. Mouse age at start date was 8 to 12 weeks. Pair matches were performed when tumors reach an average size of 100-150 mm³ and begin treatment. Body weights were taken at initiation and then biweekly to the end. Caliper measurements were taken biweekly to the end. Any adverse reactions were to be reported immediately. Any individual animal with a single observation of >than 30% body weight loss or three consecutive measurements of >25% body weight loss was euthanized. Any group with a mean body weight loss of >20% or >10% mortality stopped dosing; the group was not euthanized, and recovery is allowed. Within a group with >20% weight loss, individuals hitting the individual body weight loss endpoint were euthanized. If the group treatment related body weight loss is recovered to within 10% of the original weights, dosing resumed at a lower dose or less frequent dosing schedule. Exceptions to non-treatment body weight % recovery were allowed on a case-by-case basis. Endpoint was tumor growth delay (TGD). Animals were monitored individually. The endpoint of the experiment was a tumor volume of 1500 mm³ or 45 days, whichever comes first. Responders were followed longer. When the endpoint was reached, the animals are to be euthanized. Results are shown in FIGS. 4-6.

[0376] Sample fusion protein constructs are detailed in Table 3. In table 3, “L” is an abbreviation of “linker”, and “cleav. link.” is an abbreviation of “cleavable linker”. Other abbreviations “mIFNg” indicates mouse interferon gamma (IFNg); “hAlbumin” indicates human serum albumin (HSA); “mAlbumin” indicates mouse serum albumin.

### Example 32. Human Interferon PBMC Assay

[0377] Human PBMCs were isolated form blood obtained from healthy donors. After isolation, PBMCs were cryopreserved until the assay was performed. For the assay, PBMCs were thawed and plated in suspension at 100,000 cells/well in X-Vivo media supplemented with 1.5% of human serum albumin. 96 well round bottom plates were used for the assay. Cells were stimulated with a dilution series of recombinant human IFNα and activatable human IFNα for 48 hours at 37° C. and 5% CO₂. Activity of uncleaved and cleaved activatable IFNα was tested. Cleaved inducible IFNα was generated by incubation with active recombinant protease. PBMC supernatants were collected and amounts of CXCL-10 (IP-10) produced were quantified using AlphaLISA as a measure of response. Results are shown in FIGS. 38A-38C.

TABLE 3
CONSTRUCT PERMUTATION TABLE (“6xHis” disclosed as SEQ ID NO: 354)

| Construct | |
|---|---|
| Name | Construct Description |
| ACP01 | (anti-HSA)-(cleav. link.)-mouse IFNg-(cleav. link.)-(anti-HSA)-6xHis |
| ACP02 | (anti-HSA)-(cleav. link.)-mouse IFNg-(cleav. link.)-mouse IFNg-(cleav. link.)-(anti-HSA)- |
| | 6xHis |
| ACP03 | (anti-HSA)-(cleav. link.)-mouse IFNg-mouse IFNg-(cleav. link.)-(anti-HSA)-6xHis |
| ACP50 | (anti-EpCAM)-(anti-HSA)-(cleav. link.)-mouse IFNg-mouse IFNg-(cleav. link.)-(anti-HSA)- |
| | 6xHis |
| ACP51 | (anti-EpCAM)-Linker-(anti-HSA)-(cleav. link.)-mIFNg-(cleav. link.)-(anti-HSA)-6xHis |
| ACP52 | (anti-HSA)-(cleav. link.)-mIFNg-(cleav. link.)-(anti-HSA)-Linker-(anti-EpCAM)-6xHis |
| ACP53 | mAlbumin-(cleav. link.)-mIFNg-(cleav. link.)-mAlbumin-6xHis |
| ACP54 | mAlbumin-(cleav. link.)-mIFNg-Linker-mIFNg-(cleav. link.)-mAlbumin-6xHis |
| ACP30 | (anti-HSA)-(cleav. link.)-mouse IFNg-(cleav. link.)-(anti-HSA)-(cleav. link.)-mouse IFNg- |
| | (cleav. link.)-(anti-HSA)-6xHis |
| ACP55 | (anti-HSA)-(cleav. link.)-mouse IFNg-(cleav. link.)-(anti-HSA)-(cleav. link.)-mouse IFNg- |
| | (cleav. link.)-(anti-HSA)-6xHis-C-tag |
| ACP56 | (anti-FOLR1)-Linker-(anti-HSA)-(cleav. link.)-mIFNg-(cleav. link.)-(anti-HSA)-6xHis |
| ACP57 | (anti-HSA)-(cleav. link.)-mIFNg-(cleav. link.)-(anti-HSA)-Linker-(anti-FOLR1)-6xHis |
| ACP58 | (anti-HSA)-(cleav. link.)-mIFNg-(cleav. link.)-mIFNg-(cleav. link.)-(anti-HSA)-Linker-(anti- |
| | EpCAM)-6xHis |
| ACP59 | (anti-FOLR1)-Linker-(anti-HSA)-(cleav. link.)-mIFNg-(cleav. link.)-mIFNg-(cleav. link.)- |
| | (anti-HSA)-6xHis |
| ACP60 | (anti-HSA)-(cleav. link.)-mIFNg-(cleav. link.)-mIFNg-(cleav. link.)-(anti-HSA)-Linker-(anti- |
| | FOLR1)-6xHis |
| ACP61 | (anti-HSA)-(cleav. link.)-mIFNg-(cleav. link.)-mIFNg-(cleav. link.)-(anti-HSA)-Linker- |
| | FN(CGS-2)-6xHis |
| ACP63 | anti-FN CGS-2 scFv (Vh/Vl)-6xHis |
| ACP69 | (anti-HSA)-(cleav. link.)-mouse IFNg-(cleav. link.)-(anti-HSA)-(cleav. link.)-mouse IFNg |
| ACP70 | mouse IFNg-(cleav. link.)-(anti-HSA)-(cleav. link.)-mouse IFNg-(cleav. link.)-(anti-HSA) |
| ACP71 | mouse IFNg-(cleav. link.)-mAlbumin-(cleav. link.)-mouse IFNg-(cleav. link.)-mAlbumin |
| ACP72 | mAlbumin-(cleav. link.)-mouse IFNg-(cleav. link.)-mAlbumin-(cleav. link.)-mouse IFNg |
| ACP73 | mAlbumin-(cleav. link.)-mouse IFNg-(cleav. link.)-mAlbumin-(cleav. link.)-mouse IFNg- |
| | (cleav. link.)-mAlbumin |
| ACP74 | mAlbumin-(cleav. link.)-mouse IFNg-(cleav. link.)-5mer linker-mAlbumin-5mer linker-(cleav. |
| | link.)-mouse IFNg-(cleav. link.)-mAlbumin |
| ACP75 | mAlbumin-(cleav. link.)-mouse IFNg-(cleav. link.)-10mer linker-mAlbumin-10mer linker- |
| | (cleav. link.)-mouse IFNg-(cleav. link.)-mAlbumin |
| ACP78 | (anti-HSA)-Linker-mouse_IFNg-Linker-(anti-HSA)-Linker-mouse_IFNg-Linker-(anti- |
| | HSA)_(non-cleavable_control) |
| ACP134 | Anti-HSA-(cleav. link.)-mouse_IFNg-(cleav. link.)-anti-HSA-(cleav. link.)-mouse_IFNg- |
| | (cleav. link.)-anti-HSA-L-anti-FOLR1 |
| ACP135 | Anti-FOLR1-L-HSA-(cleav. link.)-mouse_IFNg-(cleav. link.)-HSA-(cleav. link.)-mouse_IFNg- |
| | (cleav. link.)-HSA |
| ACP04 | human p40-murine p35-6xHis |
| ACP05 | human p40-human p35-6xHis |
| ACP34 | mouse p35-(cleav. link.)-mouse p40-6xHis |
| ACP35 | mouse p35-GS-(cleav. link.)-GS-mouse p40-6xHis |
| ACP36 | (anti-HSA)-(Cleav. Linker)-mouse p40-mouse p35-(Cleav. Linker)-(anti-HSA)-6xHis |
| ACP37 | (anti-EpCAM)-(anti-HSA)-(Cleav. Linker)-mouse p40-mouse p35-(Cleav. Linker)-(anti-HSA)- |
| | 6xHis |
| ACP79 | (anti-EpCAM)-Linker-(anti-HSA)-(cleav. link.)-mIL12-(cleav. link.)-(Anti-HSA)-6xHis |
| ACP80 | (anti-HSA)-(cleav. link.)-mIL12-(cleav. link.)-(anti-HSA)-Linker-(anti-EpCAM)-6xHis |
| ACP06 | Blocker12-Linker-(cleav. link.)-human p40-Linker-mouse p35-(cleav. link.)-(anti-HSA)-6xHis |
| ACP07 | Blocker12-Linker-(cleav. link.)-human p40-Linker-mouse p35-(cleav. link.)-(anti-HSA)- |
| | Linker-(anti-FOLR1)-6xHis |
| ACP08 | (anti-FOLR1)-Linker-Blocker12-Linker-(cleav. link.)-human p40-Linker-mouse p35-(cleav. |
| | link.)-(anti-HSA)-6xHis |
| ACP09 | (anti-HSA)-Linker-Blocker12-Linker-(cleav. link.)-human p40-Linker-mouse p35-6xHis |
| ACP10 | (anti-HSA)-(cleav. link.)-human p40-L-mouse p35-(cleav. link.)-Linker-Blocker12-6xHis |
| ACP11 | Human_p40-Linker-mouse_p35-(cleav. link.)-Linker-Blocker12-Linker-(anti-HSA)-6xHis |
| ACP91 | human_p40-Linker-mouse_p35-Linker-Linker-Blocker-Linker-(anti-HSA)_(non- |
| | cleavable_control) |
| ACP136 | human p40-L-mouse p35-(cleav. link.)-Blocker |
| ACP138 | human_p40-L-mouse_p35-(cleav. link.)-Blocker-L-(anti-HSA)-L-FOLR1 |
| ACP139 | Anti-FOLR1-L-human_p40-L-mouse_p35-(cleav. link.)-Blocker12-L-(anti-HSA) |
| ACP140 | Anti-FOLR1-(cleav. link.)-human_p40-L-mouse_p35-(cleav. link.)-Blocker12-L-(anti-HSA) |
| ACP12 | (anti-EpCAM)-IL2-(cleav. link.)-(anti-HSA)-blocker2-6xHis |
| ACP13 | (anti-EpCAM)-Blocker2-(anti-HSA)-(cleav. link.)-IL2-6xHis |
| ACP14 | Blocker2-Linker-(cleav. link.)-IL2- (cleav. link.)-(anti-HSA)-6xHis |
| (WW0045) | |
| ACP15 | Blocker2-Linker-(anti-HSA)-Linker-(cleav. link.)- IL2 -6xHis |
| (WW0047) | |
| ACP16 | IL2-(cleav. link.)-(anti-HSA)-Linker-(cleav. link.)-Blocker2-6xHis |
| (WW0048) | |
| ACP17 | (anti-EpCAM)-Linker-IL2-(cleav. link.)-(anti-HSA)-Linker-(cleav. link.)-Blocker2-6xHis |
| ACP18 | (anti-EpCAM)-Linker-IL2-(cleav. link.)-(anti-HSA)-Linker-vh(cleav. link.)vl-6xHis |
| ACP19 | IL2-(cleav. link.)-Linker-Blocker2-Linker-(anti-HSA)-Linker-(anti-EpCAM) -6xHis |
| ACP20 | IL2-(cleav. link.)-Blocker2-6xHis |
| (WW0056) | |
| ACP21 | IL2-(cleav. link.)-Linker-Blocker2-6xHis |
| (WW0057) | |
| ACP22 | IL2-(cleav. link.)-Linker-blocker-(cleav. link.)-(anti-HSA)-Linker-(anti-EpCAM)-6xHis |
| ACP23 | (anti-FOLR1)-(cleav. link.)-Blocker2-Linker-(cleav. link.)-(anti-HSA)-(cleav. link.)- IL2-6xHis |
| ACP24 | (Blocker2)-(cleav. link.)-(IL2)-6xHis |
| (WW0074) | |
| ACP25 | Blocker2-Linker-(cleav. link.)-IL2-6xHis |
| (WW0075) | |
| ACP26 | (anti-EpCAM)-Linker-IL2-(cleav. link.)-(anti-HSA)-Linker-blocker(NARA1 Vh/Vl) |
| ACP27 | (anti-EpCAM)-Linker-IL2-(cleav. link.)-(anti-HSA)-Linker-blocker(NARA1 Vl/Vh) |
| ACP28 | IL2-(cleav. link.)-Linker-Blocker2-(NARA1 Vh/Vl)-Linker-(anti-HSA)-Linker-(anti-EpCAM) |
| ACP29 | IL2-(cleav. link.)-Linker-Blocker2-(NARA1 Vl/Vh)-Linker-(anti-HSA)-Linker-(anti-EpCAM) |
| ACP38 | IL2-(cleav. link.)-blocker-(anti-HSA)-(anti-EpCAM)-6xHis |
| ACP39 | (anti-EpCAM)-(cleav. link.)-(anti-HSA)-(cleav. link.)-Blocker2-(cleav. link.)-IL-2-6xHis |
| ACP40 | CD25ecd-Linker-(cleav. link.)-IL2-6xHis |
| (WW0076) | |
| ACP41 | IL2-(cleav. link.)-Linker-CD25ecd-6xHis |
| (WW0077) | |
| ACP42 | (anti-HSA)-Linker-CD25ecd-Linker-(cleav. link.)-IL2-6xHis |
| (WW0078) | |
| ACP43 | IL2-(cleav. link.)-Linker-CD25ecd-Linker-(anti-HSA)-6xHis |
| (WW0079) | |
| ACP44 | IL2-(cleav. link.)-Linker-CD25ecd-(cleav. link.)-(anti-HSA)-6xHis |
| (WW0080) | |
| ACP45 | (anti-HSA)-(cleav. link.)-Blocker2-Linker-(cleav. link.)-IL2-6xHis |
| (WW0046) | |
| ACP46 | IL2-(cleav. link.)-linkerL-vh(cleav. link.)vl-Linker-(anti-HSA)-L-(anti-EpCAM)-6xHis |
| ACP47 | (anti-EpCAM)-Linker-IL2-(Cleavable Linker)-(anti-HSA)-Linker-Blocker2-6xHis |
| ACP48 | IL2-(cleav. link.)-Blocker2-Linker-(anti-HSA)-6xHis |
| (WW0054) | |
| ACP49 | IL2-(cleav. link.)-Linker-Blocker2-Linker-(anti-HSA)-6xHis |
| (WW0055) | |
| ACP92 | (anti-HSA)-(16mer Cleav. Link.)-IL2-(16mer Cleav. Link.)-(anti-HSA)-6XHis |
| ACP93 | (anti-EpCAM)-(anti-HSA)-(anti-EpCAM)-Blocker2-(cleav. link.)-IL2-6xHis |
| ACP94 | (anti-EpCAM)-(anti-HSA)-Blocker2-(cleav. link.)-IL2-6xHis |
| ACP95 | (anti-EpCAM)-(anti-HSA)-(cleav. link.)-IL2-6xHis |
| ACP96 | (anti-EpCAM)-(16mer cleav. link.)-IL2-(16mer cleav. link.)-(anti-HSA) |
| ACP97 | (anti-EpCAM)-(anti-HSA)-(cleav. link.)-IL2-(cleav. link.)-(anti-HSA)-6xHis |
| ACP99 | (anti-EpCAM)-Linker-IL2-(cleav. link.)-(anti-HSA)-6xHis |
| ACP100 | (anti-EpCAM)-Linker-IL2-6xHis |
| ACP101 | IL2-(cleav. link.)-(anti-HSA)-6xHis |
| (WW0061) | |
| ACP102 | (anti-EpCAM)-(cleav. link.)-IL2-(cleav. link.)-(anti-HSA)-Linker-blocker-6xHis |
| ACP103 | IL2-(cleav. link.)-Linker-Blocker2-Linker-(anti-HSA)-Linker-(antiI-FOLR1)-6xHis |
| ACP104 | (anti-FOLR1)-IL2-(cleav. link.)-(anti-HSA)-Linker-Blocker2-6xHis |
| ACP105 | Blocker2-Linker-(cleav. link.)-IL2-(cleav. link.)-(anti-HSA)-Linker-(anti-FOLR1)-6xHis |
| ACP106 | (anti-FOLR1)-Linker-(anti-HSA)-(cleav. link.)-blocker-Linker-(cleav. link.)-IL2 -6xHis |
| ACP107 | Blocker2-Linker-(anti-HSA)-(cleav. link.)-IL2-Linker-(anti-FOLR1)-6xHis |
| ACP108 | (anti-EpCAM)-IL2-(Dually cleav. link.)-(anti-HSA)-Linker-blocker-6xHis |
| ACP117 | anti-FN CGS-2 scFv (Vh/Vl)-6xHis |
| ACP118 | NARA1 Vh/Vl non-cleavable |
| ACP119 | NARA1 Vh/Vl cleavable |
| ACP120 | NARA1 Vl/Vh non-cleavable |
| ACP121 | NARA1 Vl/Vh cleavable |
| ACP124 | IL2-Linker-(anti-HSA)-Linker-Linker-blocker_(non-cleavable_control) |
| (WW0159) | |
| ACP132 | IL2-L-HSA |
| (WW0177) | |
| ACP141 | IL2-L-human_Albumin |
| (WW0178) | |
| ACP142 | IL2-(cleav. link.)-human_Albumin |
| (WW0179) | |
| ACP144 | IL2-(cleav. link.)-HSA-(cleav.-link.)blocker-L-(anti-FOLR1) |
| ACP145 | Anti-F0LR1-L-IL2-(cleav. link.)-HSA-Linker-(cleav. link.)-blocker2 |
| ACP146 | Anti-FOLR1-(cleav. link)-IL2-(cleav. link.)-HSA-Linker-(cleav. link.)-blocker2 |
| ACP133 | IL2-6x His |
| (WW0196) | |
| ACP147 | IL2-(cleav. Linker)-(anti-HSA)-Linker-(cleav. link.)-blocker2-L-(anti-EpCAM) |
| ACP148 | (anti-EpCAM)-L-IL2-(cleav. link.)-(anti-HSA)-L-(cleav. Linker)-blocker2 |
| ACP149 | (anti-EpCAM)-(cleav. link.)-IL2-(cleav. Linker)-(anti-HSA)-L-(cleav. Linker)-blocker2 |
| ACP31 | (anti-HSA)-(cleav. link.)-mIFNa1-(cleav. link.)-(anti-HSA) |
| ACP32 | (anti-HSA)-(cleav. link.)-mIFNa1(N + C trunc)-(cleav. link.)-(anti-HSA) |
| ACP33 | (anti-HSA)-(cleav. link.)-mIFNa1(C trunc)-(cleav. link.)-(anti-HSA) |
| ACP131 | mIFNa1 |
| ACP125 | Anti-HSA-(cleav. link.)-mIFNa1 |
| ACP126 | mIFNa1-(cleav. link.)-(anti-HSA) |
| ACP127 | Mouse_Albumin-(cleav. Link.)-mIFNa1-(cleav link)-mouse_Albumin |
| ACP128 | Mouse_Albumin-(cleav. link.)-mIFNa1 |
| ACP129 | mIFNa1-(cleav. link.)-mAlb |
| ACP150 | (Anti-FOLR1)-L-(anti-HSA)-(cleav. Link.)-mIFNa1-(cleav. Link.)-(anti-HSA) |
| ACP151 | Anti-FOLR1-L-(anti-HSA)-(cleav. Link.)-mIFNa1-(cleav. Link.)-(anti-HSA)-L-(anti-FOLR1) |
| ACP152 | (anti-HSA)-L-mIFNa1-L-(anti-HSA)_(non-cleavable_control) |
| ACP153 | IL2-(cleav. link.)-(anti-HSA)-linker(cleav. link.)-blocker2 |
| (WW0201) | |
| ACP154 | IL2-(cleav. link.)-(anti-HSA)-linker(cleav. link.)-blocker2 |
| (WW0202) | |
| ACP155 | IL2-(cleav. link.)-(anti-HSA)-linker(cleav. link.)-blocker2 |
| (WW0203) | |
| ACP156 | IL2-X-anti-HSA-LX-blocker_(X = Linker4_Blocker = Vh-Vl) |
| (WW0204) | |
| ACP157 | IL2-X-anti-HSA-LX-blocker_(X = Linker5_Blocker = Vh-Vl) |
| (WW0205) | |
| ACP200 | mAlb(D3)-X-mouse-IFNa-X-mAlb(D3)_(X = Linker 1) |
| ACP201 | mAlb(D1-L-D3)-X-mouse-IFNa-X-mAlb(D1-L-D3)_(X = Linker 1) |
| ACP202 | HSA-X-mIFNa1-X-HSA_(X = Linker 1 + 17aa) |
| ACP203 | HSA-X-mIFNa1-X-HSA_(X = Linker 2) |
| ACP204 | HSA-X-mIFNa1-X-HSA_(X = Linker 3) |
| ACP205 | HSA-X-mIFNa1-X-HSA_(X = Linker 4) |
| ACP206 | HSA-X-Human_IFNA2b-X-HSA_(X = Linker 2) |
| ACP207 | HSA-X-Human_IFNA2b-X-HSA_(X = Linker 3) |
| ACP208 | HSA-X-Human_IFNA2b-X-HSA_(X = Linker 4) |
| ACP211 | HSA-X-mouse-IFNg-X-IFNa-X-mouse-IFNg-X-HSA_(X = Linker 1) |
| ACP213 | mAlb(D3)-X-mouse-IFNg-X-mAlb(D3)-X-mouse-IFNg-X-mAlb(D3)_(X = Linker 1) |
| ACP214 | mAlb(D1-L-D3)-X-mouse-IFNg-X-mAlb(D1-L-D3)-X-mouse-IFNg-X-mAlb(D1-L- |
| | D3)_(X = Linker 1) |
| ACP215 | HSA-X-mouse-IFNg-X-HSA-X-mouse-IFNg-X-HSA_(X = Linker 1 + 17aa) |
| ACP240 | HSA-L-human_p40-L-mouse_p35-LL-Blocker_(non-cleavable; Blocker = Vl/Vh) |
| ACP241 | mAlb-X-human_p40-L-mouse_p35-XL-Blocker_(X = Linker 1; Blocker = Vl/Vh) |
| ACP242 | human_p40-L-mouse_p35-XL-Blocker-X-mAlb_(X = Linker 1; Blocker = Vl/Vh) |
| ACP243 | mIgG1_Fc-X-human_p40-L-mouse_p35-XL-Blocker_(X = Linker 1; Blocker = Vl/Vh) |
| ACP244 | human_p40-L-mouse_p35-XL-Blocker-X-mIgG1_Fc_(X = Linker 1; Blocker = Vl/Vh) |
| ACP245 | HSA-X-human_p40-L-mouse_p35-XL-Blocker(cleavable)_(X = Linker 1; Blocker = Vl-X-Vh) |
| ACP247 | HSA-X-human_p40-L-mouse_p35-XL-Blocker_(Blocker = 3CYT5; X = Linker 1) |
| ACP284 | HSA-X-mouse_p35-XL-Blocker_(Blocker = Vl/Vh; X = Linker 1) |
| ACP285 | HSA-X-human_p40_C199S-L-mouse_p35_C92S-XL-Blocker_(Blocker = _Vl/Vh; X = Linker 1) |
| ACP286 | HSA-X-human p40-L(4xG4S (SEQ ID NO: 453))-mouse p35-XL-Blocker_(Blocker = |
| | Vl/Vh; X = Linker 1) |
| ACP287 | HSA-X-human_p40_mouse_p35-XL-Blocker_(Blocker = Vl/Vh_VH44- |
| | VL100 disulfide; X = Linker 1) |
| ACP288 | HSA-X-human_p40_mouse_p35-XL-Blocker_(Blocker = Vl/Vh_VH105- |
| | VL43_disulfide; X = Linker 1) |
| ACP289 | Geneart_WW0048_IL2-X-HSA-LX-blocker_Fusion_protein-6xHis |
| (WW0233) | |
| ACP290 | IL2-X-HSA-LX-blocker_(X = Linker 1; Blocker = 3TOW69) |
| (WW0234) | |
| ACP291 | IL2-X-HSA-LX-blocker_(X = Linker 1; Blocker = 3TOW85) |
| (WW0235) | |
| ACP292 | IL2-X-HSA-LX-blocker_(X = Linker 1; Blocker = 2TOW91) |
| (WW0236) | |
| ACP296 | IL2-X-HSA-LX-blocker(cleavable)_(X = Linker 1; Blocker = Vh-X-Vl) |
| (WW0250) | |
| ACP297 | IL2-X-HSA-LX-blocker(A46L)_(X = Linker 1; Blocker = Vh/Vl) |
| (WW0251) | |
| ACP298 | IL2-X-HSA-LX-blocker(A46G)_(X = Linker 1; Blocker = Vh/Vl) |
| (WW0252) | |
| ACP299 | IL2(Cys145Ser)-X-HSA-LX-blocker_(X = Linker 1; Blocker = Vh/Vl) |
| (WW0253) | |
| ACP300 | IL2-X-hAlb-LX-blocker_(X = Linker 1; Blocker = Vh/Vl) |
| (WW0255) | |
| ACP302 | IL2-X-mAlb-LX-blocker_(X = Linker 1; Blocker = Vh/Vl) |
| (WW0296) | |
| ACP303 | mAlb-X-IL2(Nterm-41)-X-mALB_(X = Linker 1) |
| ACP304 | IL2-X-HSA-LX-blocker-XL-CD25ecd_(X = Linker 1; Blocker = Vh/Vl) |
| (WW0302) | |
| ACP305 | CD25ecd-LX-IL2-X-HSA-LX-blocker_(X = Linker 1; Blocker = Vh/Vl) |
| (WW0303) | |
| ACP306 | IL2-XL-CD25ecd-X-HSA-LX-blocker_(X = Linker 1; Blocker = Vh/Vl) |
| (WW0304) | |
| ACP309 | IL2-X-HSA-LX-blocker(A46S)_(X = Linker 1; Blocker = Vh/Vl) |
| (WW0307) | |
| ACP310 | IL2-X-HSA-LX-blocker(QAPRL_FR2)_(X = Linker 1; Blocker = Vh/Vl) |
| (WW0308) | |
| ACP311 | IL2-X-IgG4_Fc(S228P)-LX-Blocker_(X = Linker 1; Blocker = Vh/Vl) |
| (WW0316) | |
| ACP312 | IgG4_Fc(S228P)-X-IL2-LX-Blocker_(X = Linker 1; Blocker = Vh/Vl) |
| (WW0317) | |
| ACP313 | IL2-XL-Blocker-X-IgG4_Fc(S228P)_(X = Linker 1; Blocker = Vh/Vl) |
| (WW0318) | |
| ACP314 | mIgG1_Fc-X-IL2-LX-Blocker_(X = Linker 1; Blocker = Vh/Vl) |
| (WW0354) | |
| ACP336 | IL2-X-anti-HSA-LX-blocker_(Blocker = VHVL.F2.high.A02_Vh-X-Vl_A46S; X = Linker 2) |
| (WW0414) | |
| ACP337 | IL2-X-anti-HSA-LX-blocker_(Blocker = VHVL.F2.high.A02_Vh/Vl_A46S; X = Linker 2) |
| (WW0415) | |
| ACP338 | IL2-X-anti-HSA-LX-blocker_(Blocker = VHVL.F2.high.F03_Vh-X-Vl; X = Linker 2) |
| (WW0416) | |
| ACP339 | IL2-X-anti-HSA-LX-blocker_(Blocker = VHVL.F2.high.F03_Vh/Vl; X = Linker 2) |
| (WW0417) | |
| ACP340 | IL2-X-anti-HSA-LX-blocker_(Blocker = Hu2TOW91_B; X = Linker 2) |
| (WW0418) | |
| ACP341 | IL2-X-anti-HSA-LX-blocker_(Blocker = Hu3TOW85_A; X = Linker 2) |
| (WW0419) | |
| ACP342 | CD25ecd_C213S-LX-IL2-X-anti-HSA-LX-blocker_(Blocker = VHVL.F2.high.A02_Vh-X- |
| (WW0420) | Vl_A46S; X = Linker 2) |
| ACP343 | CD25ecd_C213S-LX-IL2-X-anti-HSA-LX- |
| (WW0421) | blocker_(Blocker = VHVL.F2.high.A02_Vh/Vl_A46S; X = Linker 2) |
| ACP344 | CD25ecd_C213S-LX-IL2-X-anti-HSA-LX-blocker_(Blocker = VHVL.F2.high.F03_Vh-X- |
| (WW0422) | Vl; X = Linker 2) |
| ACP345 | CD25ecd_C213S-LX-IL2-X-anti-HSA-LX-blocker_(Blocker = VHVL.F2.high.F03_Vh/Vl; X = |
| (WW0423) | Linker 2) |
| ACP346 | CD25ecd_C213S-LX-IL2-X-anti-HSA-LX-blocker_(Blocker = Hu2TOW91_B; X = Linker 2) |
| (WW0424) | |
| ACP347 | CD25ecd_C213S-LX-IL2-X-anti-HSA-LX-blocker_(Blocker = Hu3TOW85_A; X = Linker 2) |
| (WW0425) | |
| ACP348 | IgG4_Fc(S228P)-X-IL2-LX-Blocker_(Blocker = VHVL.F2.high.A02_Vh-X-Vl_A46S; X = |
| (WW0426) | Linker 2) |
| ACP349 | IgG4_Fc(S228P)-X-IL2-LX-Blocker_(Blocker = VHVL.F2.high.A02_Vh\Vl_A46S; X = Linker |
| (WW0427) | 2) |
| ACP350 | IgG4_Fc(S228P)-X-IL2-LX-Blocker_(Blocker = VHVL.F2.high.F03_Vh-X-Vl; X = Linker 2) |
| (WW0428) | |
| ACP351 | IgG4_Fc(S228P)-X-IL2-LX-Blocker_(Blocker = VHVL.F2.high.F03_Vh\Vl; X = Linker 2) |
| (WW0429) | |
| ACP352 | IgG4_Fc(S228P)-X-IL2-LX-Blocker_(Blocker = Hu2TOW91_B; X = Linker 2) |
| (WW0430) | |
| ACP353 | IgG4_Fc(S228P)-X-IL2-LX-Blocker_(Blocker = Hu3TOW85_A; X = Linker 2) |
| (WW0431) | |
| ACP354 | IgG4_Fc(S228P)-X-CD25ecd_C213S-LX-IL2-LX-Blocker_(Blocker = VHVL.F2.high.A02_Vh- |
| (WW0432) | X-Vl_A46S; X = Linker 2) |
| ACP355 | IgG4_Fc(S228P)-X-CD25ecd_C213S-LX-IL2-LX- |
| (WW0433) | Blocker_(Blocker = VHVL.F2.high.A02_Vh\Vl_A46S; X = Linker 2) |
| ACP356 | IgG4_Fc(S228P)-X-CD25ecd_C213S-LX-IL2-LX-Blocker_(Blocker = VHVL.F2.high.F03_Vh- |
| (WW0434) | X-Vl; X = Linker 2) |
| ACP357 | IgG4_Fc(S228P)-X-CD25ecd_C213S-LX-IL2-LX- |
| (WW0435) | Blocker_(Blocker = VHVL.F2.high.F03_Vh\Vl; X = Linker 2) |
| ACP358 | IgG4_Fc(S228P)-X-CD25ecd_C213S-LX-IL2-LX-Blocker_(Blocker = Hu2TOW91_B; X = |
| (WW0436) | Linker 2) |
| ACP359 | IgG4_Fc(S228P)-X-CD25ecd_C213S-LX-IL2-LX-Blocker_(Blocker = Hu3TOW85_A; X = |
| (WW0437) | Linker 2) |
| ACP371 | IL2-X-anti-HSA-LX-blocker_(Blocker = Vh/Vl_VH44-VL100_disulfide; X = Linker 2) |
| (WW0513) | |
| ACP372 | IL2-X-anti-HSA-LX-blocker_(Blocker = Vh/Vl_VH105-VL43_disulfide; X = Linker 2) |
| (WW0514) | |
| ACP373 | IL2-X-anti-HSA-LX-blocker_(Blocker = VHVL.F2.high.A02_Vh/Vl_VH44- |
| (WW0515) | VL100_disulfide; X = Linker 2) |
| ACP374 | IL2-X-anti-HSA-LX-blocker_(Blocker = VHVL.F2.high.A02_Vh/Vl_VH105- |
| (WW0516) | VL43_disulfide; X = Linker 2) |
| ACP375 | IL2-X-anti-HSA-LX-blocker_(Blocker = VHVL.F2.high.F03_Vh/Vl_VH44- |
| (WW0517) | VL100_disulfide; X = Linker 2) |
| ACP376 | IL2-X-anti-HSA-LX-blocker_(Blocker = VHVL.F2.high.F03_Vh/Vl_VH105-VL43_disulfide X = |
| (WW0521) | Linker 2) |
| ACP377 | IL2-X-anti-HSA-LX-blocker_(Blocker = Hu2TOW91_A; X = Linker 2) |
| (WW0519) | |
| ACP378 | IL2-X-anti-HSA-LX-Heavy_blocker_Fab_(Blocker = VH-CH1; X = Linker 2) |
| (WW0520) | |
| ACP379 | IgG4_Fc(S228P)-X-IL2-LX-Heavy_blocker_Fab_(Blocker = VH-CH1; X = Linker 2) |
| (WW0521) | |
| ACP383 | IgG4_Fc(S228P)-X-IL2-LX-blocker_(Blocker = Vh/Vl_VH44-VL100_disulfide; X = LINKER 2) |
| (WW0525) | |
| ACP38 | IgG4_Fc(S228P)-X-IL2-LX-blocker_(Blocker = Vh/Vl_VH105-VL43_disulfide; X = MMP14-1) |
| (WW05264) | |
| ACP385 | IgG4_Fc(S228P)-X-IL2-LX-blocker_(Blocker = VHVL.F2.high.A02_Vh/Vl_VH44- |
| (WW0527) | VL100_disulfide; X = LINKER 2) |
| ACP386 | IgG4_Fc(S228P)-X-IL2-LX-blocker_(Blocker = VHVL.F2.high.A02_Vh/Vl_VH105- |
| (WW0528) | VL43_disulfide; X = Linker 2) |
| ACP387 | IgG4_Fc(S228P)-X-IL2-LX-blocker_(Blocker = VHVL.F2.high.F03_Vh/Vl_VH44- |
| (WW0529) | VL100_disulfide; X = Linker 2) |
| ACP388 | IgG4_Fc(S228P)-X-IL2-LX-blocker_(Blocker = VHVL.F2.high.F03_Vh/Vl_VH105- |
| (WW0530) | VL43_disulfide; X = Linker 2) |
| ACP389 | IgG4_Fc(S228P)-X-IL2-LX-blocker_(Blocker = Hu2TOW91_A; X = Linker 2) |
| (WW0531) | |
| ACP390 | IL2-X-anti-HSA-LX-blocker_(Blocker = VHVL.F2.high.A02_Vh/Vl_A46S_VH44- |
| (WW0532) | VL100_disulfide; X = Linker 2) |
| ACP391 | IgG4_Fc(S228P)-X-IL2-LX-blocker_(Blocker = VHVL.F2.high.A02_Vh/Vl_A46S_VH44- |
| (WW0533) | VL100_disulfide; X = Linker 2) |
| ACP392 | IL2-XL-CD25ecd_C213S-X-HSA-LX- |
| (WW0534) | blocker_(Blocker = VHVL.F2.high.A02_Vh_G44C_Vl_A46S_G100C; X = Linker 2) |
| ACP393 | IL2-XL-CD25ecd_C213S-X-HSA-LX- |
| (WW0535) | blocker_(Blocker = VHVL.F2.high.A02_Vh_Q105C_Vl_A43C; X = Linker 2) |
| ACP394 | IL2-XL-CD25ecd_C213S-X-HSA-LX- |
| (WW0536) | blocker_(Blocker = VHVL.F2.high.F03_Vh_G44C_Vl_G100C; X = Linker 2) |
| ACP395 | IL2-XL-CD25ecd_C213S-X-HSA-LX- |
| (WW0537) | blocker_(Blocker = VHVL.F2.high.F03_Vh_Q105C_Vl_A43C; X = Linker 2) |
| ACP396 | IL2-XL-CD25ecd_C213S-X-HSA-LX-blocker_(Blocker = Hu2TOW91_A; X = Linker 2) |
| (WW0538) | |
| ACP397 | IL2-XL-CD25ecd_C213S-X-HSA-LX-blocker_(Blocker = Hu2TOW91_B; X = Linker 2) |
| (WW0539) | |
| ACP398 | IL2-XL-CD25ecd_C213S-X-HSA-LX-Heavy_blocker_Fab_(Blocker = VH-CH1; X = Linker 2) |
| (WW0540) | |
| ACP399 | Blocker-XL-HSA-X-IL2(Nterm-41)-X- |
| | HSA_(Blocker = VHVL.F2.high.A02_Vh_G44C_Vl_A46S_G100C; X = Linker 2) |
| ACP400 | Blocker-XL-HSA-X-IL2(Nterm-41)-X- |
| | HSA_(Blocker = VHVL.F2.high.A02_Vh_Q105C_Vl_A43C; X = Linker 2) |
| ACP401 | Blocker-XL-HSA-X-IL2(Nterm-41)-X- |
| | HSA_(Blocker = VHVL.F2.high.F03_Vh_G44C_Vl_G100C; X = Linker 2) |
| ACP402 | Blocker-XL-HSA-X-IL2(Nterm-41)-X- |
| | HSA_(Blocker = VHVL.F2.high.F03_Vh_Q105C_Vl_A43C; X = Linker 2) |
| ACP403 | Blocker-XL-HSA-X-IL2(Nterm-41)-X-HSA_(Blocker = Hu2TOW91_A; X = Linker 2) |
| ACP404 | Blocker-XL-HSA-X-IL2(Nterm-41)-X-HSA_(Blocker = Hu2TOW91_B; X = Linker 2) |
| ACP405 | Heavy_Blocker_Fab-XL-HSA-X-IL2(Ntenn-41)-X-HSA_(Blocker = VH-CH1; X = Linker 2) |
| ACP406 | mIgG1_Fc(S228P)-X-IL2-LX-Heavy_blocker_Fab_(Blocker = VH-CH1; X = Linker 2) |
| (WW0548) | |
| ACP407 | mIgG1_Fc(S228P)-X-IL2-LX-blocker_(Blocker = VHVL.F2.high.A02_Vh/Vl_VH44- |
| (WW0549) | VL100_disulfide; X = Linker 2) |
| ACP408 | mIgG1_Fc(S228P)-X-IL2-LX-blocker_(Blocker = VHVL.F2.high.A02_Vh/Vl_A46S_VH44- |
| (WW0550) | VL100_disulfide; X = Linker 2) |
| ACP409 | mIgG1_Fc(S228P)-X-IL2-LX-blocker_(Blocker = VHVL.F2.high.A02_Vh/Vl_VH105- |
| (WW0551) | VL43_disulfidel; X = Linker 2) |
| ACP410 | mIgG1_Fc(S228P)-X-IL2-LX-blocker_(Blocker = VHVL.F2.high.F03_Vh/Vl_VH44- |
| (WW0552) | VL100_disulfidel; X = Linker 2) |
| ACP411 | mIgG1_Fc(S228P)-X-IL2-LX-blocker_(Blocker = VHVL.F2.high.F03_Vh/Vl_VH105- |
| (WW0553) | VL43_disulfidel; X = Linker 2) |
| ACP412 | mIgG1_Fc(S228P)-X-IL2-LX-blocker_(Blocker = Hu2TOW91_A; X = Linker 2) |
| (WW0554) | |
| ACP413 | CD25_213S-L-Kappa_blocker_Fab_(Blocker = VHVL.F2.high.A02_A46S_Kappa) |
| (WW0555) | |
| ACP414 | CD25_213S-L-Kappa_blocker_Fab_(Blocker = VHVL.F2.high.F03_Kappa) |
| (WW0556) | |
| ACP415 | IL2-XL-blocker-L-CD25_213S-X- |
| (WW0557) | HSA_Blocker = VHVL.F2.high.A02_Vh_G44C_Vl_A46S_G100C; X = Linker 2) |
| ACP416 | IL2-XL-blocker-L-CD25_213S-X- |
| (WW0558) | HSA_(Blocker = VHVL.F2.high.A02_Vh_Q105C_Vl_A43C; X = Linker 2) |
| ACP417 | IL2-XL-blocker-L-CD25_213S-X- |
| (WW0559) | HSA_(Blocker = VHVL.F2.high.F03_Vh_G44C_Vl_G100C; X = Linker 2) |
| ACP418 | IL2-XL-blocker-L-CD25_213S-X- |
| (WW0560) | HSA_(Blocker = VHVL.F2.high.F03_Vh_Q105C_Vl_A43C; X = Linker 2) |
| ACP419 | IL2-XL-blocker-L-CD25_213S-X-HSA_(Blocker = Hu2TOW91_A; X = Linker 2) |
| (WW0561) | |
| ACP420 | IL2-XL-blocker-L-CD25_213S-X-HSA_(Blocker = Hu2TOW91_B; X = Linker 2) |
| (WW0562) | |
| ACP421 | HSA-X-blocker-L-CD25_213S-LX- |
| (WW0563) | IL2_(Blocker = VHVL.F2.high.A02_Vh_G44C_Vl_A46S_G100C; X = Linker 2) |
| ACP422 | HSA-X-blocker-L-CD25_213S-LX- |
| (WW0564) | IL2_(Blocker = VHVL.F2.high.A02_Vh_Q105C_Vl_A43C; X = Linker 2) |
| ACP423 | HSA-X-blocker-L-CD25_213S-LX- |
| (WW0565) | IL2_(Blocker = VHVL.F2.high.F03_Vh_G44C_Vl_G100C; X = Linker 2) |
| ACP424 | HSA-X-blocker-L-CD25_213S-LX- |
| (WW0566) | IL2_(Blocker = VHVL.F2.high.F03_Vh_Q105C_Vl_A43C; X = Linker 2) |
| ACP425 | HSA-X-blocker-L-CD25_213S-LX-IL2_(Blocker = Hu2TOW91_A; X = Linker 2) |
| (WW0567) | |
| ACP426 | HSA-X-blocker-L-CD25_213S-LX-IL2_(Blocker = Hu2TOW91_B; X = Linker 2) |
| (WW0568) | |
| ACP427 | IL2-X-anti-HSA-LX-Blocker1-L- |
| (WW0569) | Blocker2_(Blocker1 = VHVL.F2.high.A02_Vh_G44C_Vl_A46S_G100C, |
| | Blocker2 = Hu2TOW91_A; X = Linker 2) |
| ACP428 | IL2-X-anti-HSA-LX-Blocker1-L- |
| (WW0570) | Blocker2_(Blocker1 = VHVL.F2.high.A02_Vh_Q105C_Vl_A43C, |
| | Blocker2 = Hu2TOW91_A; X = Linker 2) |
| ACP429 | IL2-X-anti-HSA-LX-Blocker1-L- |
| (WW0571) | Blocker2_(Blocker1 = VHVL.F2.high.F03_Vh_G44C_Vl_G100C, |
| | Blocker2 = Hu2TOW91_A; X = Linker 2) |
| ACP430 | IL2-X-anti-HSA-LX-Blocker1-L- |
| (WW0572) | Blocker2_(Blocker1 = VHVL.F2.high.F03_Vh_Q105C_Vl_A43C, |
| | Blocker2 = Hu2TOW91_A; X = Linker 2) |
| ACP431 | IL2-X-anti-HSA-LX-Blocker1-L- |
| (WW0573) | Blocker2_(Blocker1 = VHVL.F2.high.A02_Vh_G44C_Vl_A46S_G100C, |
| | Blocker2 = Hu2TOW91_B; X = Linker 2) |
| ACP432 | IL2-X-anti-HSA-LX-Blocker1-L- |
| (WW0574) | Blocker2_(Blocker1 = VHVL.F2.high.A02_Vh_Q105C_Vl_A43C, |
| | Blocker2 = Hu2TOW91_B; X = Linker 2) |
| ACP433 | IL2-X-anti-HSA-LX-Blocker1-L- |
| (WW0575) | Blocker2_(Blocker1 = VHVL.F2.high.F03_Vh_G44C_Vl_G100C, |
| | Blocker2 = Hu2TOW91_B; X = Linker 2) |
| ACP434 | IL2-X-anti-HSA-LX-Blocker1-L- |
| (WW0576) | Blocker2_(Blocker1 = VHVL.F2.high.F03_Vh_Q105C_Vl_A43C, |
| | Blocker2 = Hu2TOW91_B; X = Linker 2) |
| ACP439 | IL2-X-anti-HSA-LX-blocker_(Blocker = VHVL.F2.high.C07_Vh/Vl; X = Linker 2) |
| (WW0581) | |
| ACP440 | IL2-X-anti-HSA-LX-blocker_(Blocker = VHVL.F2.high.C07_Vh/Vl_A46S; X = Linker 2) |
| (WW0582) | |
| ACP441 | IL2-X-anti-HSA-LX-blocker_(Blocker = VHVL.F2.high.C07_Vh/Vl_A46L; X = Linker 2) |
| (WW0583) | |
| ACP442 | IL2-X-anti-HSA-LX-blocker_(Blocker = VHVL.F2.high.C07_Vh/Vl_A46S_VH44- |
| (WW0584) | VL100_disulfide; X = Linker 2) |
| ACP443 | IL2-X-anti-HSA-LX-blocker_(Blocker = VHVL.F2.high.C07_Vh/Vl_A46L_VH44- |
| (WW0585) | VL100_disulfide; X = Linker 2) |
| ACP444 | IL2-X-anti-HSA-LX-blocker_(Blocker = VHVL.F2.high.C07_Vh/Vl_VH105- |
| (WW0586) | VL43_disulfide; X = Linker 2) |
| ACP445 | IL2-X-anti-HSA-LX-blocker_(Blocker = VHVL.F2.high.A02_Vh-X-Vl_A46L; X = Linker 2) |
| (WW0587) | |
| ACP446 | IL2-X-anti-HSA-LX-blocker_(Blocker = VHVL.F2.high.A02_Vh/Vl_A46L; X = Linker 2) |
| (WW0588) | |
| ACP447 | IL2-X-anti-HSA-LX-blocker_(Blocker = VHVL.F2.high.A02_Vh/Vl_A46L_VH44- |
| (WW0589) | VL100_disulfide; X = Linker 2) |
| ACP451 | IL2-X-anti-HSA-LX-blocker_(Blocker = VHVL.F2.high.A02_Vh/Vl_A46S; X = Linker 3) |
| (WW0615) | |
| ACP452 | IL2-X-anti-HSA-LX-blocker_(Blocker = VHVL.F2.high.F03_Vh/Vl; X = Linker 3) |
| (WW0616) | |
| ACP453 | IL2-X-anti-HSA-LX-blocker_(Blocker = VHVL.F2.high.A02_Vh/Vl_A46S_VH44- |
| (WW0617) | VL100_disulfide; X = Linker 3) |
| ACP454 | IL2-X-anti-HSA-LX-blocker_(Blocker = VHVL.F2.high.A02_Vh/Vl_VH105- |
| (WW0618) | VL43_disulfidel; X = Linker 3) |
| ACP455 | IL2-X-anti-HSA-LX-blocker_(Blocker = VHVL.F2.high.F03_Vh/Vl_VH44- |
| (WW0619) | VL100_disulfide; X = Linker 3) |
| ACP456 | IL2-X-anti-HSA-LX-blocker_(Blocker = VHVL.F2.high.F03_Vh/Vl_VH105- |
| (WW0620) | VL43_disulfideX = Linker 3) |
| ACP457 | IL2-X-anti-HSA-LX-Heavy_blocker_Fab_(Blocker = VH-CH1; X = Linker 3) |
| (WW0621) | |
| ACP458 | IgG4_Fc(S228P)-X-IL2-LX-Heavy_blocker_Fab_(Blocker = VH-CH1; X = Linker 3) |
| (WW0622) | |
| ACP459 | IgG4_Fc(S228P)-X-IL2-LX-Blocker_(Blocker = VHVL.F2.high.A02_Vh\Vl_A46S; X = Linker |
| (WW0623) | 3) |
| ACP460 | IgG4_Fc(S228P)-X-IL2-LX-Blocker_(Blocker = VHVL.F2.high.F03_Vh\Vl; X = Linker 3) |
| (WW0624) | |
| ACP461 | IgG4_Fc(S228P)-X-IL2-LX-blocker_(Blocker = VHVL.F2.high.A02_Vh/Vl_A46S_VH44- |
| (WW0625) | VL100_disulfide; X = Linker 3) |
| ACP462 | IgG4_Fc(S228P)-X-IL2-LX-blocker_(Blocker = VHVL.F2.high.A02_Vh/Vl_VH105- |
| (WW0626) | VL43_disulfidel; X = Linker 3) |
| ACP463 | IgG4_Fc(S228P)-X-IL2-LX-blocker_(Blocker = VHVL.F2.high.F03_Vh/Vl_VH44- |
| (WW0627) | VL100_disulfidel; X = Linker 3) |
| ACP464 | IgG4_Fc(S228P)-X-IL2-LX-blocker_(Blocker = VHVL.F2.high.F03_Vh/Vl_VH105- |
| (WW0628) | VL43_disulfidel; X = Linker 3) |
| ACP465 | mIgG1_Fc-X-IL2-LX-Blocker_(Blocker = VHVL.F2.high.A02_Vh\Vl_A46S; X = Linker 3) |
| (WW0629) | |
| ACP466 | mIgG1_Fc-X-IL2-LX-Blocker_(Blocker = VHVL.F2.high.F03_Vh\Vl; X = Linker 3) |
| (WW0630) | |
| ACP467 | mIgG1_Fc-X-IL2-LX-blocker_(Blocker = VHVL.F2.high.A02_Vh/Vl_A46S_VH44- |
| (WW0631) | VL100_disulfide; X = Linker 3) |
| ACP468 | mIgG1_Fc-X-IL2-LX-blocker_(Blocker = VHVL.F2.high.A02_Vh/Vl_VH105- |
| (WW0632) | VL43_disulfidel; X = Linker 3) |
| ACP469 | mIgG1_Fc-X-IL2-LX-blocker_(Blocker = VHVL.F2.high.F03_Vh/Vl_VH44- |
| (WW0633) | VL100_disulfidel; X = Linker 3) |
| ACP470 | mIgG1_Fc-X-IL2-LX-blocker_(Blocker = VHVL.F2.high.F03_Vh/Vl_VH105- |
| (WW0634) | VL43_disulfidel; X = Linker 3) |
| ACP471 | mIgG1_Fc-X-IL2-LX-Heavy_blocker_Fab_(Blocker = VH-CH1; X = Linker 3) |
| (WW0642) | |
| WW0301 | IL2-X-anti-HSA-LL-blocker_(X = Linker1_Blocker = Vh-Vl) |
| WW0353 | IL2-X-mIgG1_Fc-LX-Blocker_(X = Linker1_Blocker = Vh-Vl) |
| WW0355 | IL2-XL-Blocker-X-mIgG1_Fc_(X = Linker1_Blocker = Vh-Vl) |
| WW0365 | IL-2-L-anti-HSA-LX-Blocker_(instead_of_WW0048_IL2-X-anti-HSA-LX- |
| | blocker)_(X = Linker) |
| WW0366 | IL-2-X-anti-HSA_(GeneArt_version_of_WW0061)_(X = Linker1) |
| WW0472 | mIgG1_Fc-X-IL2-LX-Blocker_(Blocker = VHVL.F2.high.A02_Vh-X-Vl_A46S_X = Linker2) |
| WW0473 | mIgG1_Fc-X-IL2-LX-Blocker_(Blocker = VHVL.F2.high.A02_Vh-Vl_A46S_X = Linker2) |
| WW0474 | mIgG1_Fc-X-IL2-LX-Blocker_(Blocker = VHVL.F2.high.F03_Vh-X-Vl_X = Linker2) |
| WW0475 | mIgG1_Fc-X-IL2-LX-Blocker_(Blocker = VHVL.F2.high.F03_Vh-Vl_X = Linker2) |
| WW0476 | mIgG1_Fc-X-IL2-LX-Blocker_(Blocker = Hu2TOW91_B_X = Linker2) |
| WW0477 | mIgG1_Fc-X-IL2-LX-Blocker_(Blocker = Hu3TOW85_A_X = Linker2) |
| WW0641 | anti-HSA-X-human_p40_mouse_p35-XL-Blocker_(Blocker = Vl/Vh_VH105- |
| | VL43_disulfide; X = Linker1) |
| WW0649 | anti-HSA-X-human_p40-L-mouse_p35-XL-Blocker_(Blocker = Vl/Vh_X = Linker2) |
| WW0650 | anti-HSA-X-human_p40-L-Human_p35-XL-Blocker_(Blocker = Vl/Vh_X = Linker2) |
| WW0651 | anti-HSA-X-human_p40-L-mouse_p35-XL-Blocker_(Blocker = Vl/Vh_X = Linker3) |
| WW0652 | anti-HSA-X-human_p40-L-Human_p35-XL-Blocker_(Blocker = Vl/Vh_X = Linker3) |
| WW0662 | anti-HSA-X-human_p40-L-mouse_p35-XL- |
| | Blocker_(Blocker = Opt1_Hv_D53E_D61E_Vl/Vh_X = Linker2) |
| WW0663 | anti-HSA-X-human_p40-L-human_p35-XL- |
| | Blocker_(Blocker = Opt1_Hv_D53E_D61E_Vl/Vh_X = Linker2) |
| WW0664 | anti-HSA-X-human_p40-L-mouse_p35-XL-Blocker_(Blocker = Opt2_Lv_N31E- |
| | Hv_D53E_D61E_Vl/Vh_X = Linker2) |
| WW0665 | anti-HSA-X-human_p40-L-human_p35-XL-Blocker_(Blocker = Opt2_Lv_N31E- |
| | Hv_D53E_D61E_Vl/Vh_X = Linker2) |
| WW0666 | anti-HSA-X-human_p40-L-mouse_p35-XL-Blocker_(Blocker = Opt3_LV_S30D- |
| | Hv_D53E_D61E_Vl/Vh_X = Linker2) |
| WW0667 | anti-HSA-X-human_p40-L-human_p35-XL-Blocker_(Blocker = Opt3_LV_S30D- |
| | Hv_D53E_D61E_Vl/Vh_X = Linker2) |
| WW0668 | anti-HSA-X-human_p40-L-mouse_p35-XL- |
| | Blocker_(Blocker = Opt4_LV_S30D_N31E_Vl/Vh_X = Linker2) |
| WW0669 | anti-HSA-X-human_p40-L-human_p35-XL- |
| | Blocker_(Blocker = Opt4_LV_S30D_N31E_Vl/Vh_X = Linker2) |
| WW0670 | anti-HSA-X-human_p40-L-mouse_p35-XL-Blocker_(Blocker = Opt5_Lv_S30D_N31E- |
| | Hv_D53E_D61E_Vl/Vh_X = Linker2) |
| WW0672 | anti-HSA-X-human_p40-L-mouse_p35-XL- |
| | Blocker_(Blocker = Opt6_Lv_R27E_T32D(LCharge_16(combo2))_Vl/Vh_X = Linker2) |
| WW0673 | anti-HSA-X-human_p40-L-human_p35-XL- |
| | Blocker_(Blocker = Opt6_Lv_R27E_T32D(LCharge_16(combo2))_Vl/Vh_X = Linker2) |
| WW0674 | anti-HSA-X-human_p40-L-mouse_p35-XL-Blocker_(Blocker = Opt7_Lv_S30E- |
| | Hv_D53E_D61E_Vl/Vh_X = Linker2) |
| WW0675 | anti-HSA-X-human_p40-L-human_p35-XL-Blocker_(Blocker = Opt7_Lv_S30E- |
| | Hv_D53E_D61E_Vl/Vh_X = Linker2) |
| WW0676 | anti-HSA-X-human_p40-L-mouse_p35-XL-Blocker_(Blocker = Opt8_Lv_S30E |
| | N31E_Vl/Vh_X = Linker2) |
| WW0677 | anti-HSA-X-human_p40-L-human_p35-XL-Blocker_(Blocker = Opt8_Lv_S30E |
| | N31E_Vl/Vh_X = Linker2) |
| WW0678 | anti-HSA-X-human_p40-L-mouse_p35-XL-Blocker_(Blocker = Opt9_Lv_N31E- |
| | Hv_D53E_Vl/Vh_X = Linker2) |
| WW0679 | anti-HSA-X-human_p40-L-human_p35-XL-Blocker_(Blocker = Opt9_Lv_N31E- |
| | Hv_D53E_Vl/Vh_X = Linker2) |
| WW0680 | anti-HSA-X-human_p40-L-mouse_p35-XL- |
| | Blocker_(Blocker = Opt1_Hv_D53E_D61E_Vl/Vh_X = Linker3 |
| WW0681 | anti-HSA-X-human_p40-L-human_p35-XL- |
| | Blocker_(Blocker = Opt1_Hv_D53E_D61E_Vl/Vh_X = Linker3) |
| WW0682 | anti-HSA-X-human_p40-L-mouse_p35-XL-Blocker_(Blocker = Opt2_Lv_N31E- |
| | Hv_D53E_D61E_Vl/Vh_X = Linker3 |
| WW0683 | anti-HSA-X-human_p40-L-human_p35-XL-Blocker_(Blocker = Opt2_Lv_N31E- |
| | Hv_D53E_D61E_Vl/Vh_X = Linker3) |
| WW0684 | anti-HSA-X-human_p40-L-mouse_p35-XL-Blocker_(Blocker = Opt3_LV_S30D- |
| | Hv_D53E_D61E_Vl/Vh_X = Linker3 |
| WW0685 | anti-HSA-X-human_p40-L-human_p35-XL-Blocker_(Blocker = Opt3_LV_S30D- |
| | Hv_D53E_D61E_Vl/Vh_X = Linker3) |
| WW0686 | anti-HSA-X-human_p40-L-mouse_p35-XL- |
| | Blocker_(Blocker = Opt4_LV_S30D_N31E_Vl/Vh_X = Linker3 |
| WW0687 | anti-HSA-X-human_p40-L-human_p35-XL- |
| | Blocker_(Blocker = Opt4_LV_S30D_N31E_Vl/Vh_X = Linker3) |
| WW0688 | anti-HSA-X-human_p40-L-mouse_p35-XL-Blocker_(Blocker = Opt5_Lv_S30D_N31E- |
| | Hv_D53E_D61E_Vl/Vh_X = Linker3 |
| WW0689 | anti-HSA-X-human_p40-L-human_p35-XL-Blocker_(Blocker = Opt5_Lv_S30D_N31E- |
| | Hv_D53E_D61E_Vl/Vh_X = Linker3) |
| WW0690 | anti-HSA-X-human_p40-L-mouse_p35-XL- |
| | Blocker_(Blocker = Opt6_Lv_R27E_T32D(LCharge_16(combo2))_Vl/Vh_X = Linker3 |
| WW0691 | anti-HSA-X-human_p40-L-human_p35-XL- |
| | Blocker_(Blocker = Opt6_Lv_R27E_T32D(LCharge_16(combo2))_Vl/Vh_X = Linker3) |
| WW0692 | anti-HSA-X-human_p40-L-mouse_p35-XL-Blocker_(Blocker = Opt7_Lv_S30E- |
| | Hv_D53E_D61E_Vl/Vh_X = Linker3 |
| WW0693 | anti-HSA-X-human_p40-L-human_p35-XL-Blocker_(Blocker = Opt7_Lv_S30E- |
| | Hv_D53E_D61E_Vl/Vh_X = Linker3) |
| WW0694 | anti-HSA-X-human_p40-L-mouse_p35-XL- |
| | Blocker_(Blocker = Opt8_Lv_S30E_N31E_Vl/Vh_X = Linker3 |
| WW0695 | anti-HSA-X-human_p40-L-human_p35-XL- |
| | Blocker_(Blocker = Opt8_Lv_S30E_N31E_Vl/Vh_X = Linker3) |
| WW0698 | anti-HSA-X-human_p40-L-mouse_p35-XL- |
| | Fab_Lambda_Blocker_(Blocker = Lambda_Fab_IGLC2-01_X = Linker2) |
| WW0699 | anti-HSA-X-human_p40-L-human_p35-XL- |
| | Fab_Lambda_Blocker_(Blocker = Lambda_Fab_IGLC2-01_X = Linker2) |
| WW0700 | anti-HSA-X-human_p40-L-mouse_p35-XL- |
| | Fab_Lambda_Blocker_(Blocker = Lambda_Fab_N31E_IGLC2-01_X = Linker2) |
| WW0701 | anti-HSA-X-human_p40-L-human_p35-XL- |
| | Fab_Lambda_Blocker_(Blocker = Lambda_Fab_N31E_IGLC2-01_X = Linker2) |
| WW0702 | anti-HSA-X-human_p40-L-mouse_p35-XL- |
| | Fab_Lambda_Blocker_(Blocker = Lambda_Fab_S30D_IGLC2-01_X = Linker2) |
| WW0703 | anti-HSA-X-human_p40-L-human_p35-XL- |
| | Fab_Lambda_Blocker_(Blocker = Lambda_Fab_S30D_IGLC2-01_X = Linker2) |
| WW0704 | anti-HSA-X-human_p40-L-mouse_p35-XL- |
| | Fab_Lambda_Blocker_(Blocker = Lambda_Fab_S30D_N31E_IGLC2-01_X = Linker2) |
| WW0705 | anti-HSA-X-human_p40-L-human_p35-XL- |
| | Fab_Lambda_Blocker_(Blocker = Lambda_Fab_S30D_N31E_IGLC2-01_X = Linker2) |
| WW0706 | anti-HSA-X-human_p40-L-mouse_p35-XL- |
| | Fab_Lambda_Blocker_(Blocker = Lambda_Fab_R27E_T32D_IGLC2-01_X = Linker2) |
| WW0707 | anti-HSA-X-human_p40-L-human_p35-XL- |
| | Fab_Lambda_Blocker_(Blocker = Lambda_Fab_R27E_T32D_IGLC2-01_X = Linker2) |
| WW0708 | anti-HSA-X-human_p40-L-mouse_p35-XL- |
| | Fab_Lambda_Blocker_(Blocker = Lambda_Fab_S30E_IGLC2-01_X = Linker2) |
| WW0709 | anti-HSA-X-human_p40-L-human_p35-XL- |
| | Fab_Lambda_Blocker_(Blocker = Lambda_Fab_S30E_IGLC2-01_X = Linker2) |
| WW0710 | anti-HSA-X-human_p40-L-mouse_p35-XL- |
| | Fab_Lambda_Blocker_(Blocker = Lambda_Fab_S30E_N31E_IGLC2-01_X = Linker2) |
| WW0711 | anti-HSA-X-human_p40-L-human_p35-XL- |
| | Fab_Lambda_Blocker_(Blocker = Lambda_Fab_S30E_N31E_IGLC2-01_X = Linker2) |
| WW0712 | anti-HSA-X-human_p40-L-mouse_p35-XL- |
| | Fab_Lambda_Blocker_(Blocker = Lambda_Fab_IGLC2-01_X = Linker3) |
| WW0713 | anti-HSA-X-human_p40-L-human_p35-XL- |
| | Fab_Lambda_Blocker_(Blocker = Lambda_Fab_IGLC2-01_X = Linker3) |
| WW0714 | anti-HSA-X-human_p40-L-mouse_p35-XL- |
| | Fab_Lambda_Blocker_(Blocker = Lambda_Fab_N31E_IGLC2-01_X = Linker3) |
| WW0715 | anti-HSA-X-human_p40-L-human_p35-XL- |
| | Fab_Lambda_Blocker_(Blocker = Lambda_Fab_N31E_IGLC2-01_X = Linker3) |
| WW0716 | anti-HSA-X-human_p40-L-mouse_p35-XL- |
| | Fab_Lambda_Blocker_(Blocker = Lambda_Fab_S30D_IGLC2-01_X = Linker3) |
| WW0717 | anti-HSA-X-human_p40-L-human_p35-XL- |
| | Fab_Lambda_Blocker_(Blocker = Lambda_Fab_S30D_IGLC2-01_X = Linker3) |
| WW0718 | anti-HSA-X-human_p40-L-mouse_p35-XL- |
| | Fab_Lambda_Blocker_(Blocker = Lambda_Fab_S30D_N31E_IGLC2-01_X = Linker3) |
| WW0719 | anti-HSA-X-human_p40-L-human_p35-XL- |
| | Fab_Lambda_Blocker_(Blocker = Lambda_Fab_S30D_N31E_IGLC2-01_X = Linker3) |
| WW0720 | anti-HSA-X-human_p40-L-mouse_p35-XL- |
| | Fab_Lambda_Blocker_(Blocker = Lambda_Fab_R27E_T32D_IGLC2-01_X = Linker3) |
| WW0721 | anti-HSA-X-human_p40-L-human_p35-XL- |
| | Fab_Lambda_Blocker_(Blocker = Lambda_Fab_R27E_T32D_IGLC2-01_X = Linker3) |
| WW0722 | anti-HSA-X-human_p40-L-mouse_p35-XL- |
| | Fab_Lambda_Blocker_(Blocker = Lambda_Fab_S30E_IGLC2-01_X = Linker3) |
| WW0723 | anti-HSA-X-human_p40-L-human_p35-XL- |
| | Fab_Lambda_Blocker_(Blocker = Lambda_Fab_S30E_IGLC2-01_X = Linker3) |
| WW0724 | anti-HSA-X-human_p40-L-mouse_p35-XL- |
| | Fab_Lambda_Blocker_(Blocker = Lambda_Fab_S30E_N31E_IGLC2-01_X = Linker3) |
| WW0725 | anti-HSA-X-human_p40-L-human_p35-XL- |
| | Fab_Lambda_Blocker_(Blocker = Lambda_Fab_S30E_N31E_IGLC2-01_X = Linker3) |
| WW0726 | Fab_Heavy_Blocker_(Blocker = IL-12_Heavy_Fab_IgG1_Fab) |
| WW0727 | Fab_Heavy_Blocker_(Blocker = IL-12_Heavy_Fab_D53E_D61E_IgG1_Fab) |
| WW0728 | Fab_Heavy_Blocker_(Blocker = IL-12_Heavy_Fab_D53E_IgG1_Fab) |
| WW0765 | human_p40-L-mouse_p35-X-anti-HSA-L- |
| | Blocker_(Blocker = Opt1_Hv_D53E_D61E_Vl/Vh_X = Linker2) |
| WW0766 | human_p40-L-human_p35-X-anti-HSA-L- |
| | Blocker_(Blocker = Opt1_Hv_D53E_D61E_Vl/Vh_X = Linker2) |
| WW0767 | human_p40-L-mouse_p35-X-anti-HSA-L-Blocker_(Blocker = Opt5_Lv_S30D_N31E- |
| | Hv_D53E_D61E_Vl/Vh_X = Linker2) |
| WW0768 | human_p40-L-human_p35-X-anti-HSA-L-Blocker_(Blocker = Opt5_Lv_S30D_N31E- |
| | Hv_D53E_D61E_Vl/Vh_X = Linker2) |
| WW0769 | human_p40-L-mouse_p35-X-anti-HSA-L- |
| | Fab_Lambda_Blocker_(Blocker = Lambda_Fab_IGLC2-01_X = Linker2) |
| WW0770 | human_p40-L-human_p35-X-anti-HSA-L- |
| | Fab_Lambda_Blocker_(Blocker = Lambda_Fab_IGLC2-01_X = Linker2) |
| WW0771 | human_p40-L-mouse_p35-X-anti-HSA-L- |
| | Fab_Lambda_Blocker_(Blocker = Lambda_Fab_S30D_N31E_IGLC2-01_X = Linker2) |
| WW0772 | human_p40-L-human_p35-X-anti-HSA-L- |
| | Fab_Lambda_Blocker_(Blocker = Lambda_Fab_S30D_N31E_IGLC2-01_X = Linker2) |
| WW0796 | human_p40-L-mouse_p35-X-anti-HSA-L-Blocker_(Blocker = Opt1_Hv_D53E_D61E_Vl- |
| | Vh_X = Linker3) |
| WW0797 | human_p40-L-human_p35-X-anti-HSA-L-Blocker_(Blocker = Opt1_Hv_D53E_D61E_Vl- |
| | Vh_X = Linker3) |
| WW0798 | human_p40-L-mouse_p35-X-anti-HSA-L-Blocker_(Blocker = Opt5_Lv_S30D_N31E- |
| | Hv_D53E_D61E_Vl-Vh_X = Linker3) |
| WW0799 | human_p40-L-human_p35-X-anti-HSA-L-Blocker_(Blocker = Opt5_Lv_S30D_N31E- |
| | Hv_D53E_D61E_Vl-Vh_X = Linker3) |
| WW0800 | human_p40-L-mouse_p35-X-anti-HSA-L- |
| | Fab_Lambda_Blocker_(Blocker = Lambda_Fab_IGLC2-01_X = Linker3) |
| WW0801 | human_p40-L-human_p35-X-anti-HSA-L- |
| | Fab_Lambda_Blocker_(Blocker = Lambda_Fab_IGLC2-01_X = Linker3) |
| WW0802 | human_p40-L-mouse_p35-X-anti-HSA-L- |
| | Fab_Lambda_Blocker_(Blocker = Lambda_Fab_S30D_N31E_IGLC2-01_X = Linker3) |
| WW0803 | human_p40-L-human_p35-X-anti-HSA-L- |
| | Fab_Lambda_Blocker_(Blocker = Lambda_Fab_S30D_N31E_IGLC2-01_X = Linker3) |
| WW0643 | HSA-X-mIFNa11-X-HSA_(X = Linker2) |
| WW0644 | HSA-X-mIFNa11-X-HSA_(X = Linker3) |
| WW0645 | HSA-X-Human_IFNA14-X-HSA_(X = Linker2) |
| WW0646 | HSA-X-Human_IFNA14-X-HSA_(X = Linker3) |
| WW0647 | Mouse_IFNA11 |
| WW0648 | Human_IFNA14 |
| WW0781 | HSA-X-Human_IFNA2b_T129E-X-HSA_(X = Linker2) |
| WW0782 | HSA-X-Human_IFNA14_N95D-X-HSA_(X = Linker2) |
| WW0783 | HSA-X-Human_IFNA14_N25D_S27P_N95D-X-HSA_(X = Linker2) |
| WW0784 | Human_IFNA2b_T129E |
| WW0785 | Human_IFNA14_N95D |
| WW0786 | Human_IFNA14_N25D_S27P_N95D |
| WW0815 | mAlb-X-mIFNa1-X-mAlb_(X = Linker3) |
| WW0816 | mAlb-X-mIFNa11_-X-mAlb_(X = Linker3) |
| WW0817 | anti-HSA-X-mIFNa1-X-mAlb_(X = Linker3) |
| WW0818 | anti-HSA-X-mIFNa11-mAlb_(X = Linker3) |
| WW0819 | mAlb-X-mIFNa1-X-anti-HSA_(X = Linker3) |
| WW0820 | mAlb-X-mIFNa11-anti-HSA_(X = Linker3) |
| WW0821 | Alb-X-Human_IFNA2b-X-Alb_(X = Linker3) |
| WW0822 | Alb-X-Human_IFNA14-X-Alb_(X = Linker3) |
| WW0831 | Alb-X-IFNa8-X-Alb_(X = Linker3) |
| WW0832 | Alb-X-IFNa16-Alb_(X = Linker3) |
| WW0833 | Anti-HSA-X-IFNa8-X-anti-HSA_(X = Linker3) |
| WW0834 | Anti-HSA-X-IFNa16-X-anti-HSA_(X = Linker3) |
| WW0737 | HSA-X-mIFNb-X-HSA (X = Linker2) |
| WW0738 | HSA-X-mIFNb-X-HSA (X = Linker3) |
| WW0739 | HSA-X-mIFNb C38S-X-HSA (X = Linker2) |
| WW0740 | HSA-X-mIFNb C38S-X-HSA (X = Linker3) |
| WW0741 | HSA-X-Human IFNB-X-HSA (X = Linker2) |
| WW0742 | HSA-X-Human IFNB-X-HSA (X = Linker3) |
| WW0743 | HSA-X-Human IFNB C38S-X-HSA (X = Linker 2) |
| WW0744 | HSA-X-Human IFNB C38S-X-HSA (X = Linker3) |
| WW0745 | Mouse IFNb |
| WW0746 | Mouse IFNb C3 8 S |
| WW0747 | Human IFNB |
| WW0748 | Human IFNAB C3 8 S |
| WW0787 | HSA-X-Human IFNB NI0IQ-X-HSA (X = Linker2) |
| WW0788 | HSA-X-Human IFNB N101Q C38S-X-HSA (X = Linker2) |
| WW0789 | Human IFNB N101Q |
| WW0790 | Human_IFNB_C38S_N101Q |
| WW0729 | IL2-L-anti-HSA-LL-Heavy_blocker_Fab_(Blocker = VH-CH1_non-cleavable) |
| WW0734 | IL2-X-anti-HSA-LL-Heavy_blocker_Fab_(Blocker = VH-CH1_X = Linker1) |
| WW0735 | IL2-X-anti-HSA-LL-Heavy_blocker_Fab_(Blocker = VH-CH1_X = Linker2) |
| WW0736 | IL2-X-anti-HSA-LL-Heavy_blocker_Fab_(Blocker = VH-CH1_X = Linker3) |
| WW0792 | Anti-IL-2_Fab_Heavy_IgG1_Blocker_His_tag |
| WW0061 | IL2-X-anti-HSA_Fusion_(X = Linker1) |
| ACP293 | 3TOW69sdAb |
| (WW0237) | |
| ACP294 | 3TOW85sdAb |
| (WW0238) | |
| ACP295 | 2TOW91sdAb |
| (WW0239) | |
| ACP315 | Hu2TOW91_A |
| (WW0368) | |
| ACP316 | Hu2TOW91_B |
| (WW0369) | |
| ACP317 | Hu2TOW91_C |
| (WW0370) | |
| ACP318 | Hu2TOW91_D |
| (WW0371) | |
| ACP319 | HE_LM_2TOW91 |
| (WW0372) | |
| ACP320 | HE_L_2TOW91 |
| (WW0373) | |
| ACP321 | Hu3TOW85_A |
| (WW0374) | |
| ACP322 | Hu3TOW85_B |
| (WW0375) | |
| ACP323 | Hu3TOW85_C |
| (WW0376) | |
| ACP324 | Hu3TOW85_D |
| (WW0377) | |
| ACP325 | HE_LM_3TOW85 |
| (WW0378) | |
| ACP326 | HE_L_3TOW85 |
| (WW0379) | |
| ACP327 | HE_LM_R45L_3TOW85 |
| (WW0380) | |
| ACP328 | Hu3TOW69_A |
| (WW0381) | |
| ACP329 | Hu3TOW69_B |
| (WW0382) | |
| ACP330 | Hu3TOW69_C |
| (WW0383) | |
| ACP331 | Hu3TOW69_D |
| (WW0384) | |
| ACP332 | Hu3TOW69_E |
| (WW0385) | |
| ACP333 | HE_LM_3TOW69 |
| (WW0386) | |
| ACP334 | HE_L_3TOW69 |
| (WW0387) | |
| ACP335 | HE_LM_R45L_3TOW69 |
| (WW0388_{—} | |
| ACP360 | Vh-Vl_3xG4S_A46S (“3xG4S” is disclosed as SEQ ID NO: 452) |
| (WW0438) | |
| ACP361 | Vh-Vl_3xG4S_A46S (“3xG4S” is disclosed as SEQ ID NO: 452) |
| (WW0439) | |
| ACP362 | Vh-X-Vl_X = Linker2 |
| (WW0440) | |
| ACP363 | Vh-X-Vl_X = Linker2_A46S |
| (WW0441) | |
| ACP364 | VHVL.F2.high.A02_Vh-Vl_3xG4S (“3xG4S” is disclosed as SEQ ID NO: 452) |
| (WW0442) | |
| ACP365 | VHVL.F2.high.A02_Vh-Vl_3xG4S_A46S (“3xG4S” is disclosed as SEQ ID NO: 452) |
| (WW0443) | |
| ACP366 | VHVL.F2.high.A02_Vh-X-Vl_X = Linker2 |
| (WW0444) | |
| ACP367 | VHVL.F2.high.A02_Vh-X-Vl_X = Linker2_A46S |
| (WW0445) | |
| ACP368 | VHVL.F2.high.F03_Vh-Vl_3xG4S (“3xG4S” is disclosed as SEQ ID NO: 452) |
| (WW0446) | |
| ACP369 | VHVL.F2.high.F03_Vh-X-Vl_X = Linker2 |
| (WW0449) | |
| ACP370 | VHVL.F2.high.C07_Vh-Vl_3xG4S (“3xG4S” is disclosed as SEQ ID NO: 452) |
| (WW0450) | |
| ACP380 | Kappa_blocker_Fab_(Blocker = Kappa) |
| (WW0522) | |
| ACP381 | Kappa_blocker_Fab_(Blocker = VHVL.F2.high.A02_A46S_Kappa) |
| (WW0523) | |
| ACP382 | Kappa_blocker_Fab_(Blocker = VHVL.F2.high.F03_Kappa) |
| (WW0524) | |
| ACP434 | IL2-X-anti-HSA-LX-Blocker1-L- |
| (WW0576) | Blocker2_(Blocker1 = VHVL.F2.high.F03_Vh_Q105C_Vl_A43C_Blocker2 = Hu2TOW91_B_X = |
| | Linker2) |
| ACP435 | Kappa_blocker1_Fab-L- |
| (WW0577) | blocker2_(Blocker1 = VHVL.F2.high.A02_A46S_Kappa_Blocker2 = Hu2TOW91_A) |
| ACP436 | Kappa_blocker1_Fab-L- |
| (WW0578) | blocker2_(Blocker1 = VHVL.F2.high.A02_A46S_Kappa_Blocker2 = Hu2TOW91_B) |
| ACP437 | Kappa_blocker1_Fab-L- |
| (WW0579) | blocked_(Blocker1 = VHVL.F2.high.F03_Kappa_Blocker2 = Hu2TOW91_A) |
| ACP438 | Kappa_blocker1_Fab-L- |
| (WW0580) | blocker2_(Blocker1 = VHVL.F2.high.F03_Kappa_Blocker2 = Hu2TOW91_B) |
| ACP448 | Kappa_blocker_Fab_(Blocker = VHVL.F2.high.C07_A46S_Kappa) |
| (WW0590) | |
| ACP449 | Kappa_blocker_Fab_(Blocker = VHVL.F2.high.C07_A46L_Kappa) |
| (WW0591) | |
| ACP450 | Kappa_blocker_Fab_(Blocker = VHVL.F2.high.A02_A46L_Kappa) |
| (WW0592) | |

Sequence Table

| SEQ | | |
|---|---|---|
| ID | | |
| NO. | Name | Sequence |
| 1 | Human | MYRMQLLSCI ALSLALVTNS APTSSSTKKT QLQLEHLLLD LQMILNGINN |
| | IL-2 | YKNPKLTRML TFKFYMPKKA TELKHLQCLE EELKPLEEVL NLAQSKNFHL |
| | | RPRDLISNIN VIVLELKGSE TTFMCEYADE TATIVEFLNR WITFCQSIISTLT |
| 2 | Human | MKWVTFISLL FLFSSAYSRG VFRRDAHKSE VAHRFKDLGE ENFKALVLIA |
| | serum | FAQYLQQCPF EDHVKLVNEV TEFAKTCVAD ESAENCDKSL HTLFGDKLCT |
| | albumin | VATLRETYGE MADCCAKQEP ERNECFLQHK DDNPNLPRLV RPEVDVMCTA |
| | | FHDNEETFLK KYLYEIARRH PYFYAPELLF FAKRYKAAFT ECCQAADKAA |
| | | CLLPKLDELR DEGKASSAKQ GLKCASLQKF GERAFKAWAV ARLSQRFPKA |
| | | EFAEVSKLVT DLTKVHTECC HGDLLECADD RADLAKYICE NQDSISSKLK |
| | | ECCEKPLLEK SHCIAEVEND EMPADLPSLA ADFVGSKDVC KNYAEAKDVF |
| | | LGMFLYEYAR RHPDYSVVLL LRLAKTYETT LEKCCAAADP HECYAKVFDE |
| | | FKPLVEEPQN LIKQNCELFE QLGEYKFQNA LLVRYTKKVP QVSTPTLVEV |
| | | SRNLGKVGSK CCKHPEAKRM PCAEDCLSVF LNQLCVLHEK TPVSDRVTKC |
| | | CTESLVNGRPCFSALEVDETYVPKEFNAETFTFHADICTLSEKERQIKKQTALV |
| | | ELVKHK PKATKEQLKAVMDDFAAFVEKCCKADDKET |
| | | CFAEEGKKLVAASQAALGL |
| 45 | ACP12 | QVQLQESGGGLVQAGGSLRLSCAASGRIFSIDIMSWYRQAPGKQRELVARITR |
| | (IL2 | GGTISYDDSVKGRFTISRDNAKNTVYLQMNSLKPEDTGVYYCNALYGTDYW |
| | fusion | GKGTQVTVSSggggsggggsggggsaptssstkktqlqlehllldlqmilnginnyknpklt |
| | protein) | rmltfkfympkkatelkhlqcleeelkpleevlnlaqsknfhlrprdlisninvivlelkgs |
| | | ettfmceyadetativeflnrwitfcqsiistltSG |
| | | GPGPAGMKGLPGSEVQLVESGGGLVQPGNSLRLSCAASGFTFSKFGMSWVRQ |
| | | APGKGLEWVSSISGSGRDTLYAESVKGRFTISRDNAKTTLYLQMNSLRPEDTA |
| | | VYYCTIGGSLSVSSQGTLVTVSSggggsggggsggggsEVQLVESGGGLVQPGGSLR |
| | | LSCAASGFTFSSYTLAWVRQAPGKGLEWVAAIDSSSYTYSPDTVRGRFTISRD |
| | | NAKNSLYLQMNSLRAEDTAVYYCARDSNWDALDYWGQGTTVTVSSGGGGS |
| | | GGGGSGGGGSDIQMTQSPSSLSASVGDRVTITCKASQNVGTNVGWYQQKPGK |
| | | APKALIYSASFRYSGVPSRFSGSGSGTDFTLTISSLQPEDFATYYCQQYYTYPYT |
| | | FGGGTKVEIKHHHHHH |
| 46 | ACP13 | QVQLQESGGGLVQAGGSLRLSCAASGRIFSIDIMSWYRQAPGKQRELVARITR |
| | (IL2 | GGTISYDDSVKGRFTISRDNAKNTVYLQMNSLKPEDTGVYYCNALYGTDYW |
| | fusion | GKGTQVTVSSggggsggggsggggsEVQLVESGGGLVQPGGSLRLSCAASGFTFSSY |
| | protein) | TLAWVRQAPGKGLEWVAAIDSSSYTYSPDTVRGRFTISRDNAKNSLYLQMNS |
| | | LRAEDTAVYYCARDSNWDALDYWGQGTTVTVSSGGGGSGGGGSGGGGSDI |
| | | QMTQSPSSLSASVGDRVTITCKASQNVGTNVGWYQQKPGKAPKALIYSASFR |
| | | YSGVPSRFSGSGSGTDFTLTISSLQPEDFATYYCQQYYTYPYTFGGGTKVEIKgg |
| | | ggsggggsggggsEVQLVESGGGLVQPGNSLRLSCAASGFTFSKFGMSWVRQAPGK |
| | | GLEWVSSISGSGRDTLYAESVKGRFTISRDNAKTTLYLQMNSLRPEDTAVYYC |
| | | TIGGSLSVSSQGTLVTVSSSGGPGPAGMKGLPGSaptssstkktqlqlehllldlqmilngi |
| | | nnyknpkltrmltfkfympkkatelkhlqcleeelkpleevlnlaqsknfhlrprdlisnin |
| | | vivlelkgsettfmceyadetativeflnrwitfcqsiistltHHHHHH |
| 47 | ACP14 | EVQLVESGGGLVQPGGSLRLSCAASGFTFSSYTLAWVRQAPGKGLEWVAAID |
| | (IL2 | SSSYTYSPDTVRGRFTISRDNAKNSLYLQMNSLRAEDTAVYYCARDSNWDAL |
| | fusion | DYWGQGTTVTVSSGGGGSGGGGSGGGGSDIQMTQSPSSLSASVGDRVTITCK |
| | protein) | ASQNVGTNVGWYQQKPGKAPKALIYSASFRYSGVPSRFSGSGSGTDFTLTISSL |
| | WW0045 | QPEDFATYYCQQYYTYPYTFGGGTKVEIKggggsggggsggggsggggsggggsggggsSG |
| | | GPGPAGMKGLPGSaptssstkktqlqlehllldlqmilnginnyknpkltrmltfkfympkk |
| | | atelkhlqcleeelkpleevlnlaqsknfhlrprdlisninvivlelkgsettfmceyadet |
| | | ativeflnrwitfcqsiistltSGGPGPAGMKGLPGSEVQLVESGGGLVQPGNSLRLSCAAS |
| | | GFTFSKFGMSWVRQAPGKGLEWVSSISGSGRDTLYAESVKGRFTISRDNAKTTLYLQMNSLR |
| | | PEDTAVYYCTIGGSLSVSSQGTLVTVSSHHHHHH |
| 48 | ACP15 | EVQLVESGGGLVQPGGSLRLSCAASGFTFSSYTLAWVRQAPGKGLEWVAAID |
| | (IL2 | SSSYTYSPDTVRGRFTISRDNAKNSLYLQMNSLRAEDTAVYYCARDSNWDAL |
| | fusion | DYWGQGTTVTVSSGGGGSGGGGSGGGGSDIQMTQSPSSLSASVGDRVTITCK |
| | protein) | ASQNVGTNVGWYQQKPGKAPKALIYSASFRYSGVPSRFSGSGSGTDFTLTISSL |
| | (WW0047) | QPEDFATYYCQQYYTYPYTFGGGTKVEIKggggsggggsggggsggggsggggsggggsEV |
| | | QLVESGGGLVQPGNSLRLSCAASGFTFSKFGMSWVRQAPGKGLEWVSSISGS |
| | | GRDTLYAESVKGRFTISRDNAKTTLYLQMNSLRPEDTAVYYCTIGGSLSVSSQ |
| | | GTLVTVSSggggsggggsggggsSGGPGPAGMKGLPGSaptssstkktqlqlehllldlqmi |
| | | lnginnyknpkltrmltfkfympkkatelkhlqcleeelkpleevlnlaqsknfhlrpr |
| | | sninvivlelkgsettfmceyadetativeflnrwitfcqsiistltHHHHHHdli |
| 49 | ACP16 | aptssstkktqlqlehllldlqmilnginnyknpkltrmltfkfympkkatelkhlqcleee |
| | (IL2 | lkpleevlnlaqsknfhlrprdlisninvivlelkgsettfmceyadetativeflnrwitf |
| | fusion | cqsiistltSGGPGPAGMKGLPGSEVQLVESGGGLVQPGNSLRLSCAASGFTFSKFGMSWVR |
| | protein) | QAPGKGLEWVSSISGSGRDTLYAESVKGRFTISRDNAKTTLYLQMNSLRPEDTAVYYCTIGG |
| | (WW0048) | SLSVSSQGTLVTVSSggggsggggsggggsggggsggggsggggsSGGPGPAGMKGLPGSEV |
| | | QLVESGGGLVQPGGSLRLSCAASGFTFSSYTLAWVRQAPGKGLEWVAAIDSSSYTYSPDTVR |
| | | GRFTISRDNAKNSLYLQMNSLRAEDTAVYYCARDSNWDALDYWGQGTTVTVS |
| | | SGGGGSGGGGSGGGGSDIQMTQSPSSLSASVGDRVTITCKASQNVGTNVGWY |
| | | QQKPGKAPKALIYSASFRYSGVPSRFSGSGSGTDFTLTISSLQPEDFATYYCQQ |
| | | YYTYPYTFGGGTKVEIKHHHHHH |
| 50 | ACP17 | QVQLQESGGGLVQAGGSLRLSCAASGRIFSIDIMSWYRQAPGKQRELVARITR |
| | (IL2 | GGTISYDDSVKGRFTISRDNAKNTVYLQMNSLKPEDTGVYYCNALYGTDYW |
| | fusion | GKGTQVTVSSggggsggggsggggsaptssstkktqlqlehllldlqmilnginnyknpklt |
| | protein) | rmltfkfympkkatelkhlqcleeelkpleevlnlaqsknfhlrprdlisninvivlelkgs |
| | | ettfmceyadetativeflnrwitfcqsiistltSGGPGPAGMKGLPGSEVQLVESGGGLVQ |
| | | PGNSLRLSCAASGFTFSKFGMSWVRQAPGKGLEWVSSISGSGRDTLYAESVKGRFTISRDNA |
| | | KTTLYLQMNSLRPEDTAVYYCTIGGSLSVSSQGTLVTVSSggggsggggsggggsggggsgg |
| | | ggsggggsSGGPGPAGMKGLPGSEVQLVESGGGLVQPGGSLRLSCAASGFTFSSYTLAWVRQ |
| | | APGKGLEWVAAIDSSSYTYSPDTVRGRFTISRDNAKNSLYLQMNSLRAEDTAVYYCAR |
| | | DSNWDALDYWGQGTTVTVSSGGGGSGGGGSGGGGSDIQMTQSPSSLSASVG |
| | | DRVTITCKASQNVGTNVGWYQQKPGKAPKALIYSASFRYSGVPSRFSGSGSGT |
| | | DFTLTISSLQPEDFATYYCQQYYTYPYTFGGGTKVEIKHHHHHH |
| 51 | ACP18 | QVQLQESGGGLVQAGGSLRLSCAASGRIFSIDIMSWYRQAPGKQRELVARITR |
| | (IL2 | GGTISYDDSVKGRFTISRDNAKNTVYLQMNSLKPEDTGVYYCNALYGTDYW |
| | fusion | GKGTQVTVSSggggsggggsggggsaptssstkktqlqlehllldlqmilnginnyknpklt |
| | protein) | rmltfkfympkkatelkhlqcleeelkpleevlnlaqsknfhlrprdlisninvivlelkgs |
| | | ettfmceyadetativeflnrwitfcqsiistltSGGPGPAGMKGLPGSEVQLVESGGGLVQ |
| | | PGNSLRLSCAASGFTFSKFGMSWVRQAPGKGLEWVSSISGSGRDTLYAESVKGRFTISRDNA |
| | | KTTLYLQMNSLRPEDTAVYYCTIGGSLSVSSQGTLVTVSSggggsggggsggggsggggsgg |
| | | ggsggggsEVQLVESGGGLVQPGGSLRLSCAASGFTFSSYTLAWVRQAPGKGLEWVAAIDSS |
| | | SYTYSPDTVRGRFTISRDNAKNSLYLQMNSLRAEDTAVYYCARDSNWDALDYWGQGTT |
| | | VTVSSsggpgpagmkglpgsDIQMTQSPSSLSASVGDRVTITCKASQNVGTNVGWY |
| | | QQKPGKAPKALIYSASFRYSGVPSRFSGSGSGTDFTLTISSLQPEDFATYYCQQ |
| | | YYTYPYTFGGGTKVEIKHHHHHH |
| 52 | ACP19 | aptssstkktqlqlehllldlqmilnginnyknpkltrmltfkfympkkatelkhlqcleee |
| | (IL2 | lkpleevlnlaqsknfhlrprdlisninvivlelkgsettfmceyadetativeflnrwitf |
| | fusion | cqsiistltSGGPGPAGMKGLPGSggggsggggsggggsggggsggggsggggsEVQLVESG |
| | protein) | GGLVQPGGSLRLSCAASGFTFSSYTLAWVRQAPGKGLEWVAAIDSSSYTYSPDTVRGR |
| | | FTISRDNAKNSLYLQMNSLRAEDTAVYYCARDSNW |
| | | DALDYWGQGTTVTVSSGGGGSGGGGSGGGGSDIQMTQSPSS |
| | | LSASVGDRVTITCKASQNVGTNVGWYQQKPGKAPKALIYSASFRYSGVPSRFS |
| | | GSGSGTDFTLTISSLQPEDFATYYCQQYYTYPYTFGGGTKVEIKggggsggggsggg |
| | | gsEVQLVESGGGLVQPGNSLRLSCAASGFTFSKFGMSWVRQAPGKGLEWVSSI |
| | | SGSGRDTLYAESVKGRFTISRDNAKTTLYLQMNSLRPEDTAVYYCTIGGSLSV |
| | | SSQGTLVTVSSggggsggggsggggsQVQLQESGGGLVQAGGSLRLSCAASGRIFSID |
| | | IMSWYRQAPGKQRELVARITRGGTISYDDSVKGRFTISRDNAKNTVYLQMNSL |
| | | KPEDTGVYYCNALYGTDYWGKGTQVTVSSHHHHHH** |
| 53 | ACP20 | aptssstkktqlqlehllldlqmilnginnyknpkltrmltfkfympkkatelkhlqcleee |
| | (IL2 | lkpleevlnlaqsknfhlrprdlisninvivlelkgsettfmceyadetativeflnrwitf |
| | fusion | cqsiistltSGGPGPAGMKGLPGSEVQLVESGGGLVQPGGSLRLSCAASGFTFSSYTLAWVR |
| | protein) | QAPGKGLEWVAAIDSSSYTYSPDTVRGRFTISRDNAKNSLYLQMNSLRAEDTAVYYCARDSN |
| | (WW0056) | WDALDYWGQGTTVTVSSGGGGSGGGGSGGGGSDIQMTQSPSSLSASVGDRVTITCKASQNVG |
| | | TNVGWYQQKPGKAPKALIYSASFRYSGVPSRFSGSGSGTDFTLTISSLQPEDFATY |
| | | YCQQYYTYPYTFGGGTKVEIKHHHHHH |
| 54 | ACP21 | aptssstkktqlqlehllldlqmilnginnyknpkltrmltfkfympkkatelkhlqcleee |
| | (IL2 | lkpleevlnlaqsknfhlrprdlisninvivlelkgsettfmceyadetativeflnrwitf |
| | fusion | cqsiistltSGGPGPAGMKGLPGSggggsggggsggggsggggsggggsggggsEVQLVESG |
| | protein) | GGLVQPGGSLRLSCAASGFTFSSYTLAWVRQAPGKGLEWVAAIDSSSYTYSPDTVRGRFTIS |
| | (WW0057) | RDNAKNSLYLQMNSLRAEDTAVYYCARDSNWDALDYWGQGTTVTVSSGGGGSGGGGSGGGGS |
| | | DIQMTQSPSSLSASVGDRVTITCKASQNVGTNVGWYQQKPGKAPKALIYSASFRYSGVPSRF |
| | | SGSGSGTDFTLTISSLQPEDFATYYCQQYYTYPYTFGGGTKVEIKHHHHHH |
| 55 | ACP22 | aptssstkktqlqlehllldlqmilnginnyknpkltrmltfkfympkkatelkhlqcleee |
| | (IL2 | lkpleevlnlaqsknfhlrprdlisninvivlelkgsettfmceyadetativeflnrwitf |
| | fusion | cqsiistltSGGPGPAGMKGLPGSggggsggggsggggsggggsggggsggggsEVQLVESG |
| | protein) | GGLVQPGGSLRLSCAASGFTFSSYTLAWVRQAPGKGLEWVAAIDSSSYTYSPDTVRGRFTIS |
| | | RDNAKNSLYLQMNSLRAEDTAVYYCARDSNWDALDYWGQGTTVTVSSGGGGSGGGGSGGGGS |
| | | DIQMTQSPSSLSASVGDRVTITCKASQNVGTNVGWYQQKPGKAPKALIYSASFRYSGVPSRF |
| | | SGSGSGTDFTLTISSLQPEDFATYYCQQYYTYPYTFGGGTKVEIKSGGPGPAGM |
| | | KGLPGSEVQLVESGGGLVQPGNSLRLSCAASGFTFSKFGMSWVRQAPGKGLE |
| | | WVSSISGSGRDTLYAESVKGRFTISRDNAKTTLYLQMNSLRPEDTAVYYCTIG |
| | | GSLSVSSQGTLVTVSSggggsggggsggggsQVQLQESGGGLVQAGGSLRLSCAASG |
| | | RIFSIDIMSWYRQAPGKQRELVARITRGGTISYDDSVKGRFTISRDNAKNTVYL |
| | | QMNSLKPEDTGVYYCNALYGTDYWGKGTQVTVSSHHHHHH |
| 56 | ACP23 | QVQLQESGGGLAQAGGSLSLSCAASGFTVSNSVMAWYRQTPGKQREFVAIIN |
| | (IL2 | SVGSTNYADSVKGRFTISRDNAKNTVYLQMNNLKPEDTAVYVCNRNFDRIY |
| | fusion | WGQGTQVTVSSSGGPGPAGMKGLPGSEVQLVESGGGLVQPGGSLRLSCAASG |
| | protein) | FTFSSYTLAWVRQAPGKGLEWVAAIDSSSYTYSPDTVRGRFTISRDNAKNSLY |
| | | LQMNSLRAEDTAVYYCARDSNWDALDYWGQGTTVTVSSGGGGSGGGGSGG |
| | | GGSDIQMTQSPSSLSASVGDRVTITCKASQNVGTNVGWYQQKPGKAPKALIYS |
| | | ASFRYSGVPSRFSGSGSGTDFTLTISSLQPEDFATYYCQQYYTYPYTFGGGTKV |
| | | EIKggggsggggsggggsggggsggggsggggsSGGPGPAGMKGLPGSEVQLVESGGGLVQ |
| | | PGNSLRLSCAASGFTFSKFGMSWVRQAPGKGLEWVSSISGSGRDTLYAESVKG |
| | | RFTISRDNAKTTLYLQMNSLRPEDTAVYYCTIGGSLSVSSQGTLVTVSSSGGPG |
| | | PAGMKGLPGSaptssstkktqlqlehllldlqmilnginnyknpkltrmltfkfympkkate |
| | | lkhlqcleeelkpleevlnlaqsknfhlrprdlisninvivlelkgsettfmceyadetati |
| | | veflnrwitfcqsiistltHHHHHH |
| 57 | ACP24 | EVQLVESGGGLVQPGGSLRLSCAASGFTFSSYTLAWVRQAPGKGLEWVAAID |
| | (IL2 | SSSYTYSPDTVRGRFTISRDNAKNSLYLQMNSLRAEDTAVYYCARDSNWDAL |
| | fusion | DYWGQGTTVTVSSGGGGSGGGGSGGGGSDIQMTQSPSSLSASVGDRVTITCK |
| | protein) | ASQNVGTNVGWYQQKPGKAPKALIYSASFRYSGVPSRFSGSGSGTDFTLTISSL |
| | (WW0074) | QPEDFATYYCQQYYTYPYTFGGGTKVEIKSGGPGPAGMKGLPGSaptssstkktqlql |
| | | ehllldlqmilnginnyknpkltrmltfkfympkkatelkhlqcleeelkpleevlnlaqsk |
| | | nfhlrprdlisninvivlelkgsettfmceyadetativeflnrwitfcqsiistltHHHHHH |
| 58 | ACP25 | EVQLVESGGGLVQPGGSLRLSCAASGFTFSSYTLAWVRQAPGKGLEWVAAID |
| | (IL2 | SSSYTYSPDTVRGRFTISRDNAKNSLYLQMNSLRAEDTAVYYCARDSNWDAL |
| | fusion | DYWGQGTTVTVSSGGGGSGGGGSGGGGSDIQMTQSPSSLSASVGDRVTITCK |
| | protein) | ASQNVGTNVGWYQQKPGKAPKALIYSASFRYSGVPSRFSGSGSGTDFTLTISSL |
| | (WW0075) | QPEDFATYYCQQYYTYPYTFGGGTKVEIKggggsggggsggggsggggsggggsggggsSG |
| | | GPGPAGMKGLPGSaptssstkktqlqlehllldlqmilnginnyknpkltrmltfkfympkka |
| | | telkhlqcleeelkpleevlnlaqsknfhlrprdlisninvivlelkgsettfmceyadetat |
| | | iveflnrwitfcqsiistltHHHHHH |
| 59 | ACP26 | QVQLQESGGGLVQAGGSLRLSCAASGRIFSIDIMSWYRQAPGKQRELVARITR |
| | (IL2 | GGTISYDDSVKGRFTISRDNAKNTVYLQMNSLKPEDTGVYYCNALYGTDYW |
| | fusion | GKGTQVTVSSggggsggggsggggsaptssstkktqlqlehllldlqmilnginnyknpkltr |
| | protein) | mltfkfympkkatelkhlqcleeelkpleevlnlaqsknfhlrprdlisninvivlelkgset |
| | | tfmceyadetativeflnrwitfcqsiistltSGGPGPAGMKGLPGSEVQLVESGGGLVQPGN |
| | | SLRLSCAASGFTFSKFGMSWVRQAPGKGLEWVSSISGSGRDTLYAESVKGRFTISRDNAKTTL |
| | | VYLQMNSLRPEDTAYYCTIGGSLSVSSQGTLVTVSSggggsggggsggggsggggsQVQLQQS |
| | | SGAELVRPGTVKVSCKASGYAFTNYLIEWVKQRPGQGLEWIGVINPGSGGTNYNEKFKGKA |
| | | TLTADKSSSTAYMQLSSLTSDDSAVYFCARWRGDGYYAYFDVWGAGTTVTV |
| | | SSggggsggggsggggsDIVLTQSPASLAVSLGQRATISCKASQSVDYDGDSYMNWY |
| | | QQKPGQPPKLLIYAASNLESGIPARFSGSGSGTDFTLNIHPVEEEDAATYYCQQ |
| | | SNEDPYTFGGGTKLEIKHHHHHHEPEA |
| 60 | ACP27 | QVQLQESGGGLVQAGGSLRLSCAASGRIFSIDIMSWYRQAPGKQRELVARITR |
| | (IL2 | GGTISYDDSVKGRFTISRDNAKNTVYLQMNSLKPEDTGVYYCNALYGTDYW |
| | fusion | GKGTQVTVSSggggsggggsggggsaptssstkktqlqlehllldlqmilnginnyknpkltr |
| | protein) | mltfkfympkkatelkhlqcleeelkpleevlnlaqsknfhlrprdlisninvivlelkgset |
| | | tfmceyadetativeflnrwitfcqsiistltSGGPGPAGMKGLPGSEVQLVESGGGLVQPGN |
| | | SLRLSCAASGFTFSKFGMSWVRQAPGKGLEWVSSISGSGRDTLYAESVKGRFTISRDNAKTTL |
| | | YLQMNSLRPEDTAVYYCTIGGSLSVSSQGTLVTVSSggggsggggsggggsggggsDIVLTQS |
| | | PASLAVSLGQRATISCKASQSVDYDGDSYMNWYQQKPGQPPKLLIYAASNLESGIPARFSGS |
| | | GSGTDFTLNIHPVEEEDAATYYCQQSNEDPYTFGGGTKLEIKggggsggggsggggs |
| | | QVQLQQSGAELVRPGTSVKVSCKASGYAFTNYLIEWVKQRPGQGLEWIGVIN |
| | | PGSGGTNYNEKFKGKATLTADKSSSTAYMQLSSLTSDDSAVYFCARWRGDG |
| | | YYAYFDVWGAGTTVTVSSHHHHHHEPEA |
| 61 | ACP28 | aptssstkktqlqlehllldlqmilnginnyknpkltrmltfkfympkkatelkhlqcleeel |
| | (IL2 | kpleevlnlaqsknfhlrprdlisninvivlelkgsettfmceyadetativeflnrwitfcq |
| | fusion | siistltSGGPGPAGMKGLPGSggggsggggsggggsggggsggggsQVQLQQSGAELVRPGT |
| | protein) | SVKVSCKASGYAFTNYLIEWVKQRPGQGLEWIGVINPGSGGTNYNEKFKGKATLTADKSSSTA |
| | | YMQLSSLTSDDSAVYFCARWRGDGYYAYFDVWGAGTTVTVSSggggsggggsggggsDIVLTQ |
| | | SPASLAVSLGQRATISCKASQSVDYDGDSYMNWYQQKPGQPPKLLIYAASNLESGIPARF |
| | | SGSGSGTDFTLNIHPVEEEDAATYYCQQSNEDPYTFGGGTKLEIKggggsggggsgg |
| | | ggsEVQLVESGGGLVQPGNSLRLSCAASGFTFSKFGMSWVRQAPGKGLEWVSS |
| | | ISGSGRDTLYAESVKGRFTISRDNAKTTLYLQMNSLRPEDTAVYYCTIGGSLSV |
| | | SSQGTLVTVSSggggsggggsggggsQVQLQESGGGLVQAGGSLRLSCAASGRIFSID |
| | | IMSWYRQAPGKQRELVARITRGGTISYDDSVKGRFTISRDNAKNTVYLQMNSL |
| | | KPEDTGVYYCNALYGTDYWGKGTQVTVSSHHHHHHEPEA |
| 62 | ACP29 | aptssstkktqlqlehllldlqmilnginnyknpkltrmltfkfympkkatelkhlqcleeel |
| | (IL2 | kpleevlnlaqsknfhlrprdlisninvivlelkgsettfmceyadetativeflnrwitfcq |
| | fusion | siistltSGGPGPAGMKGLPGSggggsggggsggggsggggsggggsDIVLTQSPASLAVSLG |
| | protein) | QRATISCKASQSVDYDGDSYMNWYQQKPGQPPKLLIYAASNLESGIPARFSGSGSGTDFTLNI |
| | | HPVEEEDAATYYCQQSNEDPYTFGGGTKLEIKggggsggggsggggsQVQLQQSGAELVRPGT |
| | | SVKVSCKASGYAFTNYLIEWVKQRPGQGLEWIGVINPGSGGTNYNEKFKGKATLTADKSSST |
| | | AYMQLSSLTSDDSAVYFCARWRGDGYYAYFDVWGAGTTVTVSSggggsggggsg |
| | | gggsEVQLVESGGGLVQPGNSLRLSCAASGFTFSKFGMSWVRQAPGKGLEWVS |
| | | SISGSGRDTLYAESVKGRFTISRDNAKTTLYLQMNSLRPEDTAVYYCTIGGSLS |
| | | VSSQGTLVTVSSggggsggggsggggsQVQLQESGGGLVQAGGSLRLSCAASGRIFSI |
| | | DIMSWYRQAPGKQRELVARITRGGTISYDDSVKGRFTISRDNAKNTVYLQMN |
| | | SLKPEDTGVYYCNALYGTDYWGKGTQVTVSSHHHHHHEPEA |
| 63 | IL2Ra | 10 20 30 40 50 |
| | | MDSYLLMWGL LTFIMVPGCQ AELCDDDPPE IPHATFKAMA YKEGTMLNCE |
| | | 60 70 80 90 100 |
| | | CKRGFRRIKS GSLYMLCTGN SSHSSWDNQC QCTSSATRNT TKQVTPQPEE |
| | | 110 120 130 140 150 |
| | | QKERKTTEMQ SPMQPVDQAS LPGHCREPPP WENEATERIY HFVVGQMVYY |
| | | 160 170 180 190 200 |
| | | QCVQGYRALH RGPAESVCKM THGKTRWTQP QLICTGEMET SQFPGEEKPQ |
| | | 210 220 230 240 250 |
| | | ASPEGRPESE TSCLVTTTDF QIQTEMAATM ETSIFTTEYQ VAVAGCVFLL |
| | | 260 270 |
| | | ISVLLLSGLT WQRRQRKSRR TI |
| 64 | IL2Rb | 10 20 30 40 50 |
| | | MAAPALSWRL PLLILLLPLA TSWASAAVNG TSQFTCFYNS RANISCVWSQ |
| | | 60 70 80 90 100 |
| | | DGALQDTSCQ VHAWPDRRRW NQTCELLPVS QASWACNLIL GAPDSQKLTT |
| | | 110 120 130 140 150 |
| | | VDIVTLRVLC REGVRWRVMA IQDFKPFENL RLMAPISLQV VHVETHRCNI |
| | | 160 170 180 190 200 |
| | | SWEISQASHY FERHLEFEAR TLSPGHTWEE APLLTLKQKQ EWICLETLTP |
| | | 210 220 230 240 250 |
| | | DTQYEFQVRV KPLQGEFTTW SPWSQPLAFR TKPAALGKDT IPWLGHLLVG |
| | | 260 270 280 290 300 |
| | | LSGAFGFIIL VYLLINCRNT GPWLKKVLKC NTPDPSKFFS QLSSEHGGDV |
| | | 310 320 330 340 350 |
| | | QKWLSSPFPS SSFSPGGLAP EISPLEVLER DKVTQLLLQQ DKVPEPASLS |
| | | 360 370 380 390 400 |
| | | SNHSLTSCFT NQGYFFFHLP DALEIEACQV YFTYDPYSEE DPDEGVAGAP |
| | | 410 420 430 440 450 |
| | | TGSSPQPLQP LSGEDDAYCT FPSRDDLLLF SPSLLGGPSP PSTAPGGSGA |
| | | 460 470 480 490 500 |
| | | GEERMPPSLQ ERVPRDWDPQ PLGPPTPGVP DLVDFQPPPE LVLREAGEEV |
| | | 510 520 530 540 550 |
| | | PDAGPREGVS FPWSRPPGQG EFRALNARLP LNTDAYLSLQ ELQGQDPTHL |
| | | V |
| 65 | IL2Rg | 10 20 30 40 50 |
| | | MLKPSLPFTS LLFLQLPLLG VGLNTTILTP NGNEDTTADF FLTTMPTDSL |
| | | 60 70 80 90 100 |
| | | SVSTLPLPEV QCFVFNVEYM NCTWNSSSEP QPTNLTLHYW YKNSDNDKVQ |
| | | 110 120 130 140 150 |
| | | KCSHYLFSEE ITSGCQLQKK EIHLYQTFVV QLQDPREPRR QATQMLKLQN |
| | | 160 170 180 190 200 |
| | | LVIPWAPENL TLHKLSESQL ELNWNNRFLN HCLEHLVQYR TDWDHSWTEQ |
| | | 210 220 230 240 250 |
| | | SVDYRHKFSL PSVDGQKRYT FRVRSRFNPL CGSAQHWSEW SHPIHWGSNT |
| | | 260 270 280 290 300 |
| | | SKENPFLFAL EAVVISVGSM GLIISLLCVY FWLERTMPRI PTLKNLEDLV |
| | | 310 320 330 340 350 |
| | | TEYHGNFSAW SGVSKGLAES LQPDYSERLC LVSEIPPKGG ALGEGPGASP |
| | | 360 |
| | | CNQHSPYWAP PCYTLKPET |
| 66 | ACP04 | iwelkkdvyvveldwypdapgemvvltcdtpeedgitwtldqssevlgsgktltiqvkefgda |
| | (human | gqytchkggevlshsllllhkkedgiwstdilkdqkepknktflrceaknysgrftcwwltti |
| | p40/ | stdltfsvkssrgssdpqgvtcgaatlsaervrgdnkeyeysvecqedsacpaaeeslpievm |
| | murine | vdavhklkyenytssffirdiikpdppknlqlkplknsrqvevsweypdtwstphsyfsltfc |
| | p35 IL12 | vqvqgkskrekkdrvftdktsatvicrknasisvraqdryyssswsewasvpcsggggsgggg |
| | fusion | sggggsrvipvsgparclsqsrnllkttddmvktareklkhysctaedidheditrdqtstlk |
| | protein) | tclplelhknesclatretssttrgsclppqktslmmtlclgsiyedlkmyqtefqainaalq |
| | | nhnhqqiildkgmlvaidelmqslnhngetlrqkppvgeadpyrvkmklcillhafstrvvti |
| | | nrvmgylssaHHHHHH |
| 67 | ACP05 | iwelkkdvyvveldwypdapgemvvltcdtpeedgitwtldqssevlgsgktltiqvkefgda |
| | (human | gqytchkggevlshsllllhkkedgiwstdilkdqkepknktflrceaknysgrftcwwltti |
| | p40/ | stdltfsvkssrgssdpqgvtcgaatlsaervrgdnkeyeysvecqedsacpaaeeslpievm |
| | murine | vdavhklkyenytssffirdiikpdppknlqlkplknsrqvevsweypdtwstphsyfsltfc |
| | p35 IL12 | vqvqgkskrekkdrvftdktsatvicrknasisvraqdryyssswsewasvpcsggggsgggg |
| | fusion | sggggsrnlpvatpdpgmfpclhhsqnllravsnmlqkarqtlefypctseeidheditkdkt |
| | protein) | stveaclpleltknesclnsretsfitngsclasrktsfmmalclssiyedlkmyqvefktmn |
| | | akllmdpkrqifldqnmlavidelmqalnfnsetvpqkssleepdfyktkiklcillhafrir |
| | | avtidrvmsylnasHHHHHH |
| 68 | ACP06 | QSVLTQPPSVSGAPGQRVTISCSGSRSNIGSNTVKWYQQLPGTAPKLLIYYNDQ |
| | (human | RPSGVPDRFSGSKSGTSASLAITGLQAEDEADYYCQSYDRYTHPALLFGTGTK |
| | p40/ | VTVLggggsggggsggggsQVQLVESGGGVVQPGRSLRLSCAASGFTFSSYGMHWV |
| | murine | RQAPGKGLEWVAFIRYDGSNKYYADSVKGRFTISRDNSKNTLYLQMNSLRAE |
| | p35 IL12 | DTAVYYCKTHGSHDNWGQGTMVTVSSggggsggggsggggsggggsggggsggggsSGG |
| | fusion | PGPAGMKGLPGSiwelkkdvyvveldwypdapgemvvltcdtpeedgitwtldqssevlgsgk |
| | protein) | tltiqvkefgdagqytchkggevlshsllllhkkedgiwstdilkdqkepknktflrceakny |
| | | sgrftcwwlttistdltfsvkssrgssdpqgvtcgaatlsaervrgdnkeyeysvecqedsac |
| | | paaeeslpievmvdavhklkyenytssffirdiikpdppknlqlkplknsrqvevsweypdtw |
| | | stphsyfsltfcvqvqgkskrekkdrvftdktsatvicrknasisvraqdryyssswsewasv |
| | | pcsggggsggggsggggsrvipvsgparclsqsrnllkttddmvktareklkhysctaedidh |
| | | editrdqtstlktclplelhknesclatretssttrgsclppqktslmmtlclgsiyedlkmy |
| | | qtefqainaalqnhnhqqiildkgmlvaidelmqslnhngetlrqkppvgeadpyrvkmklci |
| | | llhafstrvvtinrvmgylssaSGGPGPAGMKGLPGSEVQLVESGGGLVQPGNSLRLSCAASG |
| | | EFTFSKFGMSWVWVSSISGSGRDTLYAESVKGRFTISRDNAKTTLYLQMNSLRPEDTAVYYCT |
| | | IGGSLSVSSQGTLRQAPGKGLVTVSSHHHHHHEPEA |
| 69 | ACP07 | QSVLTQPPSVSGAPGQRVTISCSGSRSNIGSNTVKWYQQLPGTAPKLLIYYNDQ |
| | (human | RPSGVPDRFSGSKSGTSASLAITGLQAEDEADYYCQSYDRYTHPALLFGTGTK |
| | p40/ | VTVLggggSgEEgSEEggSQVQLVESGGGVVQPGRSLRLSCAASGFTFSSYGMHWV |
| | murine | RQAPGKGLEWVAFIRYDGSNKYYADSVKGRFTISRDNSKNTLYLQMNSLRAE |
| | p35 IL12 | DTAVYYCKTHGSHDNWGQGTMVTVSSggggsggggsggggsggggsggggsggggsSGG |
| | fusion | PGPAGMKGLPGSiwelkkdvyvveldwypdapgemvvltcdtpeedgitwtldqssevlgsgk |
| | protein) | tltiqvkefgdagqytchkggevlshsllllhkkedgiwstdilkdqkepknktflrceakny |
| | | sgrftcwwlttistdltfsvkssrgssdpqgvtcgaatlsaervrgdnkeyeysvecqedsac |
| | | paaeeslpievmvdavhklkyenytssffirdiikpdppknlqlkplknsrqvevsweypdtw |
| | | stphsyfsltfcvqvqgkskrekkdrvftdktsatvicrknasisvraqdryyssswsewasv |
| | | pcsggggsggggsggggsrvipvsgparclsqsrnllkttddmvktareklkhysctaedidh |
| | | editrdqtstlktclplelhknesclatretssttrgsclppqktslmmtlclgsiyedlkmy |
| | | qtefqainaalqnhnhqqiildkgmlvaidelmqslnhngetlrqkppvgeadpyrvkmklci |
| | | llhafstrvvtinrvmgylssaSGGPGPAGMKGLPGSEVQLVESGGGLVQPGNSLRLSCAASG |
| | | FTFSKFGMSWVRQAPGKGLEWVSSISGSGRDTLYAESVKGRFTISRDNAKTTLYLQMNSLRPE |
| | | DTAVYYCTIGGSLSVSSQGTLVTVSSggggsggggsggggsQVQLQESGGGLAQAGGSLSLSC |
| | | AASGFTVSNSVMAWYRQTPGKQREFVAIINSVGSTNYADSVKGRFTISRDNAKNTVYLQMNNL |
| | | KPEDTAVYVCNRNFDRIYWGQGTQVTVSSHHHHHHEPEA |
| 70 | ACP08 | QVQLQESGGGLAQAGGSLSLSCAASGFTVSNSVMAWYRQTPGKQREFVAIIN |
| | (human | SVGSTNYADSVKGRFTISRDNAKNTVYLQMNNLKPEDTAVYVCNRNFDRIY |
| | p40/ | WGQGTQVTVSSggggsggggsggggsQSVLTQPPSVSGAPGQRVTISCSGSRSNIGSN |
| | murine | TVKWYQQLPGTAPKLLIYYNDQRPSGVPDRFSGSKSGTSASLAITGLQAEDEA |
| | p35 IL12 | DYYCQSYDRYTHPALLFGTGTKVTVLggggsggggsggggsQVQLVESGGGVVQPG |
| | fusion | RSLRLSCAASGFTFSSYGMHWVRQAPGKGLEWVAFIRYDGSNKYYADSVKG |
| | protein) | RFTISRDNSKNTLYLQMNSLRAEDTAVYYCKTHGSHDNWGQGTMVTVSSggg |
| | | gsggggsggggsggggsggggsggggsSGGPGPAGMKGLPGSiwelkkdvyvveldwypdapg |
| | | emvvltcdtpeedgitwtldqssevlgsgktltiqvkefgdagqytchkggevlshsllllhk |
| | | kedgiwstdilkdqkepknktflrceaknysgrftcwwlttistdltfsvkssrgssdpqgvt |
| | | cgaatlsaervrgdnkeyeysvecqedsacpaaeeslpievmvdavhklkyenytssffirdi |
| | | ikpdppknlqlkplknsrqvevsweypdtwstphsyfsltfcvqvqgkskrekkdrvftdkts |
| | | atvicrknasisvraqdryyssswsewasvpcsggggsggggsggggsrvipvsgparclsqs |
| | | rnllkttddmvktareklkhysctaedidheditrdqtstlktclplelhknesclatretss |
| | | ttrgsclppqktslmmtlclgsiyedlkmyqtefqainaalqnhnhqqiildkgmlvaidelm |
| | | qslnhngetlrqkppvgeadpyrvkmklcillhafstrvvtinrvmgylssaSGGPGPAGMKG |
| | | LPGSEVQLVESGGGLVQPGNSLRLSCAASGFTFSKFGMSWVRQAPGKGLEWVSSISGSGRDTL |
| | | YAESVKGRFTISRDNAKTTLYLQMNSLRPEDTAVYYCTIGGSLSVSSQGTLVTVSSHHHHHHE |
| | | PEA |
| 71 | ACP09 | EVQLVESGGGLVQPGNSLRLSCAASGFTFSKFGMSWVRQAPGKGLEWVSSIS |
| | (human | GSGRDTLYAESVKGRFTISRDNAKTTLYLQMNSLRPEDTAVYYCTIGGSLSVS |
| | p40/ | SQGTLVTVSSggggsggggsggggsQSVLTQPPSVSGAPGQRVTISCSGSRSNIGSNTV |
| | murine | KWYQQLPGTAPKLLIYYNDQRPSGVPDRFSGSKSGTSASLAITGLQAEDEADY |
| | p35 IL12 | YCQSYDRYTHPALLFGTGTKVTVLggggsggggsggggsQVQLVESGGGVVQPGRS |
| | fusion | LRLSCAASGFTFSSYGMHWVRQAPGKGLEWVAFIRYDGSNKYYADSVKGRF |
| | protein) | TISRDNSKNTLYLQMNSLRAEDTAVYYCKTHGSHDNWGQGTMVTVSSggggsg |
| | | gggsggggsggggsggggsggggsSGGPGPAGMKGLPGSiwelkkdvyvveldwypdapgemv |
| | | vltcdtpeedgitwtldqssevlgsgktltiqvkefgdagqytchkggevlshsllllhkked |
| | | giwstdilkdqkepknktflrceaknysgrftcwwlttistdltfsvkssrgssdpqgvtcga |
| | | atlsaervrgdnkeyeysvecqedsacpaaeeslpievmvdavhklkyenytssffirdiikp |
| | | dppknlqlkplknsrqvevsweypdtwstphsyfsltfcvqvqgkskrekkdrvftdktsatv |
| | | icrknasisvraqdryyssswsewasvpcsggggsggggsggggsrvipvsgparclsqsrnl |
| | | lkttddmvktareklkhysctaedidheditrdqtstlktclplelhknesclatretssttr |
| | | gsclppqktslmmtlclgsiyedlkmyqtefqainaalqnhnhqqiildkgmlvaidelmqsl |
| | | nhngetlrqkppvgeadpyrvkmklcillhafstrvvtinrvmgylssaHHHHHHEPEA |
| 72 | ACP10 | EVQLVESGGGLVQPGNSLRLSCAASGFTFSKFGMSWVRQAPGKGLEWVSSIS |
| | (human | GSGRDTLYAESVKGRFTISRDNAKTTLYLQMNSLRPEDTAVYYCTIGGSLSVS |
| | p40/ | SQGTLVTVSSSGGPGPAGMKGLPGSiwelkkdvyvveldwypdapgemvvltcdtpeedgitw |
| | murine | tldqssevlgsgktltiqvkefgdagqytchkggevlshsllllhkkedgiwstdilkdqkep |
| | p35 IL12 | knktflrceaknysgrftcwwlttistdltfsvkssrgssdpqgvtcgaatlsaervrgdnke |
| | fusion | yeysvecqedsacpaaeeslpievmvdavhklkyenytssffirdiikpdppknlqlkplkns |
| | protein) | rqvevsweypdtwstphsyfsltfcvqvqgkskrekkdrvftdktsatvicrknasisvraqd |
| | | ryyssswsewasvpcsggggsggggsggggsrvipvsgparclsqsrnllkttddmvktarek |
| | | lkhysctaedidheditrdqtstlktclplelhknesclatretssttrgsclppqktslmmt |
| | | lclgsiyedlkmyqtefqainaalqnhnhqqiildkgmlvaidelmqslnhngetlrqkppvg |
| | | eadpyrvkmklcillhafstrvvtinrvmgylssaSGGPGPAGMKGLPGSggggsggggsggg |
| | | gsggggsggggsggggsQSVLTQPPSVSGAPGQRVTISCSGSRSNIGSNTVKWYQQLPGTAPK |
| | | LLIYYNDQRPSGVPDRFSGSKSGTSASLAITGLQAEDEADYYCQSYDRYTHPALLFGTGTKVT |
| | | VLggggsggggsggggsQVQLVESGGGVVQPGRSLRLSCAASGFTFSSYGMHWVRQAPGKGLE |
| | | WVAFIRYDGSNKYYADSVKGRFTISRDNSKNTLYLQMNSLRAEDTAVYYCKTHGSHDNWGQGT |
| | | MVTVSSHHHHHHEPEA |
| 73 | ACP11 | iwelkkdvyvveldwypdapgemvvltcdtpeedgitwtldqssevlgsgktltiqvkefgda |
| | (human | gqytchkggevlshsllllhkkedgiwstdilkdqkepknktflrceaknysgrftcwwltti |
| | p40/ | stdltfsvkssrgssdpqgvtcgaatlsaervrgdnkeyeysvecqedsacpaaeeslpievm |
| | murine | vdavhklkyenytssffirdiikpdppknlqlkplknsrqvevsweypdtwstphsyfsltfc |
| | p35 IL12 | vqvqgkskrekkdrvftdktsatvicrknasisvraqdryyssswsewasvpcsggggsgggg |
| | fusion | sggggsrvipvsgparclsqsrnllkttddmvktareklkhysctaedidheditrdqtstlk |
| | protein) | tclplelhknesclatretssttrgsclppqktslmmtlclgsiyedlkmyqtefqainaalq |
| | | nhnhqqiildkgmlvaidelmqslnhngetlrqkppvgeadpyrvkmklcillhafstrvvti |
| | | nrvmgylssaSGGPGPAGMKGLPGSggggsggggsggggsggggsggggsggggsQSVLTQPP |
| | | SVSGAPGQRVTISCSGSRSNIGSNTVKWYQQLPGTAPKLLIYYNDQRPSGVPDRFSGSKSGTS |
| | | ASLAITGLQAEDEADYYCQSYDRYTHPALLFGTGTKVTVLggggsggggsggggsQVQLVESG |
| | | AGGVVQPGRSLRLSCASGFTFSSYGMHWVRQAPGKGLEWVAFIRYDGSNKYYADSVKGRFTIS |
| | | RDNSKNTLYLQMNSLRAEDTAVYYCKTHGSHDNWGQGTMVTVSSggggsggggsggggsEVQL |
| | | VESGGGLVQPGNSLRLSCAASGFTFSKFGMSWVRQAPGKGLEWVSSISGSGRDTLYA |
| | | ESVKGRFTISRDNAKTTLYLQMNSLRPEDTAVYYCTIGGSLSVSSQGTLVTVSS |
| | | HHHHHHEPEA |
| 74 | IL12 p40 | 10 20 30 40 50 |
| | human | MCHQQLVISW FSLVFLASPL VAIWELKKDV YVVELDWYPD APGEMVVLTC |
| | (Uniprot | 60 70 80 90 100 |
| | Accession | DTPEEDGITW TLDQSSEVLG SGKTLTIQVK EFGDAGQYTC HKGGEVLSHS |
| | No. | 110 120 130 140 150 |
| | P29460) | LLLLHKKEDG IWSTDILKDQ KEPKNKTFLR CEAKNYSGRF TCWWLTTIST |
| | | 160 170 180 190 200 |
| | | DLTFSVKSSR GSSDPQGVTC GAATLSAERV RGDNKEYEYS VECQEDSACP |
| | | 210 220 230 240 250 |
| | | AAEESLPIEV MVDAVHKLKY ENYTSSFFIR DIIKPDPPKN LQLKPLKNSR |
| | | 260 270 280 290 300 |
| | | QVEVSWEYPD TWSTPHSYFS LTFCVQVQGK SKREKKDRVF TDKTSATVIC |
| | | 310 320 |
| | | RKNASISVRA QDRYYSSSWS EWASVPCS |
| 75 | IL12 p35 | 10 20 30 40 50 |
| | mouse | MCQSRYLLFL ATLALLNHLS LARVIPVSGP ARCLSQSRNL LKTTDDMVKT |
| | (Uniprot | 60 70 80 90 100 |
| | Accession | AREKLKHYSC TAEDIDHEDI TRDQTSTLKT CLPLELHKNE SCLATRETSS |
| | No. | 110 120 130 140 150 |
| | P43431) | TTRGSCLPPQ KTSLMMTLCL GSIYEDLKMY QTEFQAINAA LQNHNHQQII |
| | | 160 170 180 190 200 |
| | | LDKGMLVAID ELMQSLNHNG ETLRQKPPVG EADPYRVKMK LCILLHAFST |
| | | 210 |
| | | RVVTINRVMG YLSSA |
| 76 | IL12Rb-2 | 10 20 30 40 50 |
| | | MAHTFRGCSL AFMFIITWLL IKAKIDACKR GDVTKKPSHV ILLGSTVNIT |
| | | 60 70 80 90 100 |
| | | CSLKPRQGCF HYSRRNKLIL YKFDRRINFH HGHSLNSQVI GLPLGTILFV |
| | | l10 120 130 140 150 |
| | | CKLACINSDE IQICGAEIFV GVAPEQPQNL SCIQKGEQGI VACTNERGRD |
| | | 160 170 180 190 200 |
| | | THLYIEYTLQ LSGPKNLTNQ KQCKDIYCDY LSKGINLTPE SPESNFTAKV |
| | | 210 220 230 240 250 |
| | | TAVNSLGSSS SLPSTFTFLD IVRPLPPNDI RIKFQKASVS RCILYNPDEG |
| | | 260 270 280 290 300 |
| | | IVLLNPLRYR PSNSRLWNDV NVIKAKGRHD LLDLKPFTEY KFQISSKLHL |
| | | 310 320 330 340 350 |
| | | YKGSWSDWSE SLRAQTPEEE PTGMLDVWYM KRHIDYSRQQ ISLEWKNLSV |
| | | 360 370 380 390 400 |
| | | SEARGKILHY QVILQELTGG KAMTQNITGH TSWITVIRRT GNWAVAVSAA |
| | | 410 420 430 440 450 |
| | | NSKGSSLPTR INIMNLCEAG LLAPRQVSAN SEGMDNILVT WQPPRKDPSA |
| | | 460 470 480 490 500 |
| | | VQEYVVENRE LRPGGDTQVR LNWLRSRPYN VSALISENIK SVICYEIRVY |
| | | 510 520 530 540 550 |
| | | ALSGDQGGCS SILGNSEHKA PLSGPHINAI TEEKGSILIS WNSTPVQEQM |
| | | 560 570 580 590 600 |
| | | GCLLHYRIYN KERDSNSQRQ LCEIPYPVSQ NSHPINSLQR RVTYYLWMTA |
| | | 610 620 630 640 650 |
| | | LTAAGESSHG NEREFCLQSK ANWMAFYAPS ICIAIIMVGI FSTHYFQQKV |
| | | 660 670 680 690 700 |
| | | FVLLAALRPQ WCSREIPDPA NSTCAKKYPI AEEKTQLPLD RLLIDWPTPE |
| | | 710 720 730 740 750 |
| | | DPEPLVISEY LRQVTPVERH PPCSNWPQRE KGIQGHQASE KDMMHSASSR |
| | | 760 770 780 790 800 |
| | | PPPRALQAES RQLVDLYKVL ESRGSDPKPE NPACPWTVLP AGDLPTHDGY |
| | | 810 820 830 840 850 |
| | | LPSNIDDLPS HEAPLADSLE ELEPQHISLS VFPSSSLHPL IFSCGDKLTL |
| | | 860 |
| | | DQLKMRCDSL ML |
| 77 | IL12Rb-1 | 10 20 30 40 50 |
| | | MEPLVTWVVP LLFLFLLSRQ GAACRTSECC FQDPPYPDAD SGSASGPRDL |
| | | 60 70 80 90 100 |
| | | RCYRISSDRY ECSWQYEGPT AGVSHFLRCC LSSGRCCYFA AGSAIRLQFS |
| | | 110 120 130 140 150 |
| | | DQAGVSVLYT VTLWVESWAR NQTEKSPEVT LQLYNSVKYE PPLGDIKVSK |
| | | 160 170 180 190 200 |
| | | LAGQLRMEWE TPDNQVGAEV QFRHRTPSSP WKLGDCGPQD DDTESCLCPL |
| | | 210 220 230 240 250 |
| | | EMNVAQEFQL PRRQLGSQGS SWSKWSSPVC VPPENPPQPQ VRFSVEQLGQ |
| | | 260 270 280 290 300 |
| | | DGRRRLTLKE QPTQLELPEG CQGLAPGTEV TYRLQLHMLS CPCKAKATRT |
| | | 310 320 330 340 350 |
| | | LHLGMMPYLS GAAYNVAVIS SNQFGPGLNQ TWHIPADTHT EPVALNISVG |
| | | 360 370 380 390 400 |
| | | TNGTTMYWPA RAQSMTYCIE WQPVGQDGGL ATCSLTAPQD PDPAGMATYS |
| | | 410 420 430 440 450 |
| | | WSRESGAMGQ EKCYYITIFA SAHPEKLTLW STVLSTYHFG GNASAAGTPH |
| | | 460 470 480 490 500 |
| | | HVSVKNHSLD SVSVDWAPSL LSTCPCVLKE YVVRCRDEDS KQVSEHPVQP |
| | | 510 520 530 540 550 |
| | | TETQVTLSGL RAGVAYTVQV RADTANLRGV WSQPQRFSIE VQVSDWLIFF |
| | | 560 570 580 590 600 |
| | | ASLGSFLSIL LVGVLGYLGL NRAARHLCPP LPIPCASSAI SFPGGKETWQ |
| | | 610 620 630 640 650 |
| | | WINPVDPQEE ASLQEALVVE MSWDKGERTE PLEKTELPEG APELALDTEL |
| | | 660 |
| | | SLEDGDRCKA KM |
| 78 | IL-12 p35 | 10 20 30 40 50 |
| | human | MCHQQLVISW FSLVFLASPL VAIWELKKDV YVVELDWYPD APGEMVVLTC |
| | (Uniprot | 60 70 80 90 100 |
| | accession | DTPEEDGITW TLDQSSEVLG SGKTLTIQVK EFGDAGQYTC HKGGEVLSHS |
| | no. | 110 120 130 140 150 |
| | P29459) | LLLLHKKEDG IWSTDILKDQ KEPKNKTFLR CEAKNYSGRF TCWNLTTIST |
| | | 160 170 180 190 200 |
| | | DLTFSVKSSR GSSDPQGVTC GAATLSAERV RGDNKEYEYS VECQEDSACP |
| | | 210 220 230 240 250 |
| | | AAEESLPIEV MVDAVHKLKY ENYTSSFFIR DIIKPDPPKN LQLKPLKNSR |
| | | 260 270 280 290 300 |
| | | QVEVSWEYPD TWSTPHSYFS LTFCVQVQGK SKREKKDRVF TDKTSATVIC |
| | | 310 320 |
| | | RKNASISVRA QDRYYSSSWS EWASVPCS |
| 79 | IL-12 p40 | 10 20 30 40 50 |
| | mouse | MCPQKLTISW FAIVLLVSPL MAMWELEKDV YVVEVDWTPD APGETVNLTC |
| | (Uniprot | 60 70 80 90 100 |
| | accession | DTPEEDDITW TSDQRHGVIG SGKTLTITVK EFLDAGQYTC HKGGETLSHS |
| | no. | 110 120 130 140 150 |
| | P43432) | HLLLHKKENG IWSTEILKNF KNKTFLKCEA PNYSGRFTCS WLVQRNMDLK |
| | | 160 170 180 190 200 |
| | | FNIKSSSSSP DSRAVTCGMA SLSAEKVTLD QRDYEKYSVS CQEDVTCPTA |
| | | 210 220 230 240 250 |
| | | EETLPIELAL EARQQNKYEN YSTSFFIRDI IKPDPPKNLQ MKPLKNSQVE |
| | | 260 270 280 290 300 |
| | | VSWEYPDSWS TPHSYFSLKF FVRIQRKKEK MKETEEGCNQ KGAFLVEKTS |
| | | 310 320 330 |
| | | TEVQCKGGNV CVQAQDRYYN SSCSKWACVP CRVRS |
| 80 | ACP01 | EVQLVESGGGLVQPGNSLRLSCAASGFTFSKFGMSWVRQAPGKGLEWVSSIS |
| | (mouse | GSGRDTLYAESVKGRFTISRDNAKTTLYLQMNSLRPEDTAVYYCTIGGSLSVS |
| | IFNg | SQGTLVTVSSSGGPGPAGMKGLPGShgtviesleslnnyfnssgidveekslfldiwrnwqkd |
| | fusion | gdmkilqsqiisfylrlfevlkdnqaisnnisvieshlittffsnskakkdafmsiakfevnn |
| | protein) | pqvqrqafnelirvvhqllpesslrkrkrsrcSGGPGPAGMKGLPGSEVQLVESGGGLVQPGN |
| | | SLRLSCAASGFTFSKFGMSWVRQAPGKGLEWVSSISGSGRDTLYAESVKGRFTISRDN |
| | | AKTTLYLQMNSLRPEDTAVYYCTIGGSLSVSSQGTLVTVSSHHHHHH |
| 81 | ACP02 | EVQLVESGGGLVQPGNSLRLSCAASGFTFSKFGMSWVRQAPGKGLEWVSSIS |
| | (mouse | GSGRDTLYAESVKGRFTISRDNAKTTLYLQMNSLRPEDTAVYYCTIGGSLSVS |
| | IFNg | SQGTLVTVSSSGGPGPAGMKGLPGShgtviesleslnnyfnssgidveekslfldiwrnwqkd |
| | fusion | kilqsqiisfylrlfevlkdnqaisnnisvieshlittffsnskakkdafmsiakfevnnpqv |
| | protein) | qrgdmqafnelirvvhqllpesslrkrkrsrcSGGPGPAGMKGLPGShgtviesleslnnyfn |
| | | ssgidveekslfldiwrnwqkdgdmkilqsqiisfylrlfevlkdnqaisnnisvieshlitt |
| | | ffsnskakkdafmsiakfevlnnpqvqrqafneirvvhqllpesslrkrkrsrcSGGPGPAGM |
| | | KGLPGSEVQLVESGGGLQVQPGNSLRLSAPGKGLEWVSSISGSGRDTLYAESVKGRFTISRDN |
| | | AKTTLYLQMNSLRPEDTACAASGFTFSKFGMSWVRVYYCTIGGSLSVSSQGTLVTVSSHHHHH |
| | | H |
| 82 | ACP03 | EVQLVESGGGLVQPGNSLRLSCAASGFTFSKFGMSWVRQAPGKGLEWVSSIS |
| | (mouse | GSGRDTLYAESVKGRFTISRDNAKTTLYLQMNSLRPEDTAVYYCTIGGSLSVS |
| | IFNg | SQGTLVTVSSSGGPGPAGMKGLPGShgtviesleslnnyfnssgidveekslfldiwrnwqkd |
| | fusion | gdmkilqsqiisfylrlfevlkdnqaisnnisvieshlittffsnskakkdafmsiakfevnn |
| | protein) | pqvqrqafnelirvvhqllpesslrkrkrsrcggggsggggsggggshgtviesleslnnyfn |
| | | ssgidveekslfldiwrnwqkdgdmkilqsqiisfylrlfevlkdnqaisnnisvieshlitt |
| | | ffsnskakkdafmsiakfevnnpqvqrqafnelirvvhqllpesslrkrkrsrcSGGPGP |
| | | AGMKGLPGSEVQLVESGGGLVQPGNSLRLSCAASGFTFSKFGMSWVRQAPGK |
| | | GLEWVSSISGSGRDTLYAESVKGRFTISRDNAKTTLYLQMNSLRPEDTAVYYC |
| | | TIGGSLSVSSQGTLVTVSSHHHHHH |
| 83 | Human | 10 20 30 40 50 |
| | IFN-g | MKVTSYILAF QLCIVLFSLG CYCQDPYVKE AENLKKYFNA GHSDVASNGT |
| | (Uniprot | 60 70 80 90 100 |
| | Accession | LFLGILKNWK EESDRKIMQS QIVSFYFKLF KNFKDDQSIQ KSVETIKEDM |
| | No. | 110 120 130 140 150 |
| | P01579) | NVKFFNSNKK KRDDFEKLTH YSVTDLNVQR KAIHELIQVM AELSPAAKTG |
| | | 160 |
| | | KRKRSQMLFR GRRASQ |
| 84 | Mouse | 10 20 30 40 50 |
| | IFN-g | MNATHCILAL QLFLMAVSGC YCHGTVIESL ESLNNYFNSS GIDVEEKSLF |
| | (Uniprot | 60 70 80 90 100 |
| | Accession | LDIWRNWQKD GDMKILQSQI ISFYLRLFEV LKDNQAISNN ISVIESHLIT |
| | No. | 110 120 130 140 150 |
| | P01580) | TFFSNSKAKK DAFMSIAKFE VNNPQVQRQA FNELIRVVHQ LLPESSLRKR |
| | | KRSRC |
| 85 | ACP30 | mdmrvpaqllgllllwlrgarcEVQLVESGGGLVQPGNSLRLSCAASGFTFSKFGMSWVR |
| | (mouse | QAPGKGLEWVSSISGSGRDTLYAESVKGRFTISRDNAKTTLYLQMNSLRPEDT |
| | IFNg | AVYYCTIGGSLSVSSQGTLVTVSSSGGPGPAGMKGLPGShgtviesleslnnyfnssgidvee |
| | fusion | kslfldiwrnwqkdgdmkilqsqiisfylrlfevlkdnqaisnnisvieshlittffsnskak |
| | protein) | kdafmsiakfevnnpqvqrqafnelirvvhqllpesslrkrkrsrcSGGPGPAGMKGLPGSEV |
| | | QLVESGGGLVQPGNSLRLSCAASGFTFSKFGMSWVRQAPGKGLEWVSSISGSGRDTLYAESVK |
| | | GRFTISRDNAKTTLYLQMNSLRPEDTAVYYCTIGGSLSVSSQGTLVTVSSSGGPGPAGMKGLP |
| | | GShgtviesleslnnyfnssgidveekslfldiwrnwqkdgdmkilqsqiisfylrlfevlkd |
| | | nqaisnnisvieshlittffsnskakkdafmsiakfevnnpqvqrqafnelirvvhqllpess |
| | | lrkrkrsrcSGGPGPAGMKGLPGSEVQLVESGGGLVQPGNSLRLSCAASGFTFSKFGMSWVRQ |
| | | APGKGLEWVSSISGSGRDTLYAESVKGRFTISRDNAKTTLYLQMNSLRPEDTAVYYCTIGGSL |
| | | SVSSQGTLVTVSSHHHHHH |
| 86 | ACP31 | EVQLVESGGGLVQPGNSLRLSCAASGFTFSKFGMSWVRQAPGKGLEWVSSIS |
| | (mouse | GSGRDTLYAESVKGRFTISRDNAKTTLYLQMNSLRPEDTAVYYCTIGGSLSVS |
| | IFNa1 | SQGTLVTVSSSGGPGPAGMKGLPGScdlpqthnlrnkraltllvqmrrlsplsclkdrkdfgf |
| | fusion | pqekvdaqqikkaqaipvlseltqqilniftskdssaawnttlldsfcndlhqqlndlqgclm |
| | protein) | qqvtvylrekkhspcawevvraevwralsssanvlgrlreekSGGPGPAGMKGLPGSgvqefp |
| | | ltqedallavrkyfhriEVQLVESGGGLVQPGNSLRLSCAASGFTFSKFGMSWVRQAPGKGLE |
| | | WVSSISGSGRDTLYAESVKGRFTISRDNAKTTLYLQMNSLRPEDTAVYYCTIGGSLSVSSQGT |
| | | LVTVSSHHHHHHEPEA |
| 87 | ACP32 | EVQLVESGGGLVQPGNSLRLSCAASGFTFSKFGMSWVRQAPGKGLEWVSSIS |
| | (mouse | GSGRDTLYAESVKGRFTISRDNAKTTLYLQMNSLRPEDTAVYYCTIGGSLSVS |
| | IFNa1 | SQGTLVTVSSSGGPGPAGMKGLPGScdlpqthnlrnkraltllvqmrrlsplsclkdrkdfgf |
| | fusion | pqekvdaqqikkaqaipvlseltqqilniftskdssaawnttlldsfcndlhqqlndlqgclm |
| | protein) | qqvgvqiefpltqedallavrkyfhrtvylrekkhspcawevvraevwralsssanvSGGPGP |
| | | AGMKGLPGSEVQLVESGGGLVQPGNSLRLSCAASGFTFSKFGMSWVRQAPGKGLEWVSSISGS |
| | | GRDTLYAESVKGRFTISRDNAKTTLYLQMNSLRPEDTAVYYCTIGGSLSVSSQGTLVTVSSHH |
| | | HHHHEPEA |
| 88 | IFNgR1 | 10 20 30 40 50 |
| | | MALLFLLPLV MQGVSRAEMG TADLGRSSVP IPTNVTIESY MMNPIVYWEY |
| | | 60 70 80 90 100 |
| | | QIMPQVPVFT VEVKNYGVKN SEWIDACINI SHHYCNISDH VGDPSNSLWV |
| | | 110 120 130 140 150 |
| | | RVKARVGQKE SAYAKSEEFA VCRDGKIGPP KLDIRKEEKQ IMIDIFHPSV |
| | | 160 170 180 190 200 |
| | | PVNGDEQEVD YDPSTTCYIR VYNVYVRMNG SEIQYKILTQ KEDDCDEIQC |
| | | 210 220 230 240 250 |
| | | QLAIPVSSLN SQYCVSAEGV LHVWGVTTEK SKEVCITIFN SSIKGSLWIP |
| | | 260 270 280 290 300 |
| | | VVAALLLFLV LSIVFICFYI KKINPLKEKS IILPKSLISV VRSAILETKP |
| | | 310 320 330 340 350 |
| | | ESKYVSLITS YQPFSLELEV VCEEPLSPAT VPGMHTEDNP GKVEHTEELS |
| | | 360 370 380 390 400 |
| | | SITEVVTTEE NIPDVVPGSH LTPIEPESSS PLSSNQSEPG SIALNSYHSR |
| | | 410 420 430 440 450 |
| | | NCSESDHSRN GFDTDSSCLE SHSSLSDSEF PPNNKGEIKT EGQELITVIK |
| | | 460 470 480 |
| | | APTSFGYDKP HVLVDLLVDD SGKESLIGYR PTEDSKEFS |
| 89 | IFNgR2 | 10 20 30 40 50 |
| | | MRPTLLWSLL LLLGVFAAAA AAPPDPLSQL PAPQHPKIRL YNAEQVLSQE |
| | | 60 70 80 90 100 |
| | | PVALSNSTRP VVYQVQFKYI DSKWFTADIM SIGVNCIQIT ATECDFIAAS |
| | | 110 120 130 140 150 |
| | | PSAGFPMDFN VILRLRAELG ALHSAWVTMP WFQHYRNVTV GPPENIEVTP |
| | | 160 170 180 190 200 |
| | | GEHSLIIRFS SPFDIADTST AFFCYYVHYW EKGGIQQVKG PFRSNSISLD |
| | | 210 220 230 240 250 |
| | | NLKPSEVYCL QVQAQLLWNK SNIFRVGHLS NISCYEIMAD ASTELQQVIL |
| | | 260 270 280 290 300 |
| | | ISVSTFSLLS VLAGRCFFLV LKYRGLIKYW FHTPPSIPLQ IEEYLKDPTQ |
| | | 310 320 330 |
| | | PILEALDKDS SPKDDVWDSV SIISFPEKEQ EDVLQTL |
| 90 | ACP51 | QVQLQESGGGLVQAGGSLRLSCAASGRIFSIDIMSWYRQAPGKQRELVARITR |
| | Mouse IFG | GGTISYDDSVKGRFTISRDNAKNTVYLQMNSLKPEDTGVYYCNALYGTDYW |
| | fusion | GKGTQVTVSSggggsggggsggggsEVQLVESGGGLVQPGNSLRLSCAASGFTFSKF |
| | protein | GMSWVRQAPGKGLEWVSSISGSGRDTLYAESVKGRFTISRDNAKTTLYLQMN |
| | | SLRPEDTAVYYCTIGGSLSVSSQGTLVTVSSSGGPGPAGMKGLPGShgtvieslesln |
| | | nyfnssgidveekslfldiwrnwqkdgdmkilqsqiisfylrlfevlkdnqaisnnisviesh |
| | | littffsnskakkdafmsiakfevnnpqvqrqafnelirvvhqllpesslrkrkrsrcSGGPG |
| | | PAGMKGLPGSEVQLVESGGGLVQPGNSLRLSCAASGFTFSKFGMSWVRQAPGKGLEWVSSISG |
| | | SGRDTLYAESVKGRFTISRDNAKTTLYLQMNSLRPEDTAVYYCTIGGSLSVSSQGTLVTVSSH |
| | | HHHHH |
| 91 | ACP52 | EVQLVESGGGLVQPGNSLRLSCAASGFTFSKFGMSWVRQAPGKGLEWVSSIS |
| | Mouse IFG | GSGRDTLYAESVKGRFTISRDNAKTTLYLQMNSLRPEDTAVYYCTIGGSLSVS |
| | fusion | SQGTLVTVSSSGGPGPAGMKGLPGShgtviesleslnnyfnssgidveekslfldiwrnwqkd |
| | protein | gdmkilqsqiisfylrlfevlkdnqaisnnisvieshlittffsnskakkdafmsiakfevnn |
| | | pqvqrqafnelirvvhqllpesslrkrkrsrcSGGPGPAGMKGLPGSEVQLVESGGGLVQPGN |
| | | SLRLSCAASGFTFSKFGMSWVRQAPGKGLEWVSSISGSGRDTLYAESVKGRFTISRDNAKTTL |
| | | YLQMNSLRPEDTAVYYCTIGGSLSVSSQGTLVTVSSSGGPGPAGMKGLPGSEVQLVESG |
| | | GGLVQPGNSLRLSCAASGFTFSKFGMSWVRQAPGKGLEWVSSISGSGRDTLY |
| | | AESVKGRFTISRDNAKTTLYLQMNSLRPEDTAVYYCTIGGSLSVSSQGTLVTV |
| | | SSggggsggggsggggsQVQLQESGGGLVQAGGSLRLSCAASGRIFSIDIMSWYRQA |
| | | PGKQRELVARITRGGTISYDDSVKGRFTISRDNAKNTVYLQMNSLKPEDTGVY |
| | | YCNALYGTDYWGKGTQVTVSSHHHHHH |
| 92 | ACP53 | eahkseiahryndlgeqhfkglvliafsqylqkcsydehaklvqevtdfaktcvadesaancd |
| | Mouse IFG | kslhtlfgdklcaipnlrenygeladcctkqepernecflqhkddnpslppferpeaeamcts |
| | fusion | fkenpttfmghylhevarrhpyfyapellyyaeqyneiltqccaeadkescltpkldgvkeka |
| | protein | lvssvrqrmkcssmqkfgerafkawavarlsqtfpnadfaeitklatdltkvnkecchgdlle |
| | | caddraelakymcenqatissklqtccdkpllkkahclsevehdtmpadlpaiaadfvedqev |
| | | cknyaeakdvflgtflyeysrrhpdysvslllrlakkyeatlekccaeanppacygtvlaefq |
| | | plveepknlvktncdlyeklgeygfqnailvrytqkapqvstptlveaarnlgrvgtkcctlp |
| | | edqrlpcvedylsailnrvcllhektpvsehvtkccsgslverrpcfsaltvdetyvpkefka |
| | | etftfhsdictlpekekqikkqtalaelvkhkpkataeqlktvmddfaqfldtcckaadkdtm |
| | | cfstegpnlvtrckdalaSGGPGPAGMKGLPGShgtviesleslnnyfnssgidveekslfld |
| | | iwrnwqkdgdkilqsqiisfylrlfevlkdnqaisnnisvieshlittffsnskakkdafmsi |
| | | akfevnnpqvqrqafnelirvvhqllpesslrkrkrsrcSGGPGPAGMKGLPGSeahkseiah |
| | | ryndlgeqhfkglvliafsqylqkcsydehaklvqevtdfaktcvadesaancdkslhtlfgd |
| | | klcaipnlrenygeladcctkqepernecflqhkddnpslppferpeaeamctsfkenpttfm |
| | | ghylhevarrhpyfyapellyyaeqyneiltqccaeadkescltpkldgvkekalvssvrqrm |
| | | kcssmqkfgerafkawavarlsqtfpnadfaeitklatdltkvnkecchgdllecaddraela |
| | | kymcenqatissklqtccdkpllkkahclsevehdtmpadlpaiaadfvedqevcknyaeakd |
| | | vflgtflyeysrrhpdysvslllrlakkyeatlekccaeanppacygtvlaefqplveepknl |
| | | vktncdlyeklgeygfqnailvrytqkapqvstptlveaarnlgrvgtkcctlpedqrlpcve |
| | | dylsailnrvcllhektpvsehvtkccsgslverrpcfsaltvdetyvpkefkaetftfhsdi |
| | | ctlpekekqikkqtalaelvkhkpkataeqlktvmddfaqfldtcckaadkdtcfstegpnlv |
| | | trckdalaHHHHHH |
| 93 | ACP54 | eahkseiahryndlgeqhfkglvliafsqylqkcsydehaklvqevtdfaktcvadesaancd |
| | Mouse IFG | kslhtlfgdklcaipnlrenygeladcctkqepernecflqhkddnpslppferpeaeamcts |
| | fusion | fkenpttfmghylhevarrhpyfyapellyyaeqyneiltqccaeadkescltpkldgvkeka |
| | protein | lvssvrqrmkcssmqkfgerafkawavarlsqtfpnadfaeitklatdltkvnkecchgdlle |
| | | caddraelakymcenqatissklqtccdkpllkkahclsevehdtmpadlpaiaadfvedqev |
| | | cknyaeakdvflgtflyeysrrhpdysvslllrlakkyeatlekccaeanppacygtvlaefq |
| | | plveepknlvktncdlyeklgeygfqnailvrytqkapqvstptlveaarnlgrvgtkcctlp |
| | | edqrlpcvedylsailnrvcllhektpvsehvtkccsgslverrpcfsaltvdetyvpkefka |
| | | etftfhsdictlpekekqikkqtalaelvkhkpkataeqlktvmddfaqfldtcckaadkdtm |
| | | cfstegpnlvtrckdalaSGGPGPAGMKGLPGShgtviesleslnnyfnssgidveekslfld |
| | | iwrnwqkdgdkilqsqiisfylrlfevlkdnqaisnnisvieshlittffsnskakkdafmsi |
| | | akfevnnpqvqrqafnelirvvhqllpesslrkrkrsrcggggsggggsggggshgtviesle |
| | | slnnyfnssgidveekslfldiwrnwqkdgdmkilqsqiisfylrlfevlkdnqaisnnisvi |
| | | eshlittffsnskakkdafmsiakfevnnpqvqrqafnelirvvhqllpesslrkrkrsrcSG |
| | | GPGPAGMKGLPGSeahkseiahiyndlgeqhfkglvliafsqylqkcsydehaklvqevtdfa |
| | | ktcvadesaancdkslhtlfgdklcaipnlrenygeladcctkqepernecflqhkddnpslp |
| | | pferpeaeamctsfkenpttfmghylhevarrhpyfyapellyyaeqyneiltqccaeadkes |
| | | cltpkldgvkekalvssvrqrmkcssmqkfgerafkawavarlsqtfpnadfaeitklatdlt |
| | | kvnkecchgdllecaddraelakymcenqatissklqtccdkpllkkahclsevehdtmpadl |
| | | paiaadfvedqevcknyaeakdvflgtflyeysrrhpdysvslllrlakkyeatlekccaean |
| | | ppacygtvlaefqplveepknlvktncdlyeklgeygfqnailvrytqkapqvstptlveaar |
| | | nlgrvgtkcctlpedqrlpcvedylsailnrvcllhektpvsehvtkccsgslverrpcfsal |
| | | tvdetyvpkefkaetftfhsdictlpekekqikkqtalaelvkhkpkataeqlktvmddfaqf |
| | | ldtcckaadkdtcfstegpnivtrckdalaHHHHHH |
| 94 | ACP50 | mdmrvpaqllgllllwlrgarcQVQLQESGGGLVQAGGSLRLSCAASGRIFSIDIMSWYR |
| | Mouse IFG | QAPGKQRELVARITRGGTISYDDSVKGRFTISRDNAKNTVYLQMNSLKPEDTG |
| | fusion | VYYCNALYGTDYWGKGTQVTVSSggggsggggsggggsEVQLVESGGGLVQPGNS |
| | protein | LRLSCAASGFTFSKFGMSWVRQAPGKGLEWVSSISGSGRDTLYAESVKGRFTI |
| | | SRDNAKTTLYLQMNSLRPEDTAVYYCTIGGSLSVSSQGTLVTVSSSGGPGPAG |
| | | MKGLPGShgtviesleslnnyfnssgidveekslfldiwrnwqkdgdmkilqsqiisfylrlf |
| | | evlkdnqaisnnisvieshlittffsnskakkdafmsiakfevnnpqvqrqafnelirvvhql |
| | | lpesslrkrkrsrcggggsggggsggggshgtviesleslnnyfnssgidveekslfldiwrn |
| | | wqkdgdmkilqsqiisfylrlfevlkdnqaisnnisvieshlittffsnskakkdafmsiakf |
| | | evnnpqvqrqafnelirvvhqllpesslrkrkrsrcSGGPGPAGMKGLPGSEVQLVES |
| | | GGGLVQPGNSLRLSCAASGFTFSKFGMSWVRQAPGKGLEWVSSISGSGRDTL |
| | | YAESVKGRFTISRDNAKTTLYLQMNSLRPEDTAVYYCTIGGSLSVSSQGTLVT |
| | | VSSHHHHHH |
| 95 | ACP55 | mdmrvpaqllgllllwlrgarcEVQLVESGGGLVQPGNSLRLSCAASGFTFSKFGMSWVR |
| | Mouse IFG | QAPGKGLEWVSSISGSGRDTLYAESVKGRFTISRDNAKTTLYLQMNSLRPEDT |
| | fusion | AVYYCTIGGSLSVSSQGTLVTVSSSGGPGPAGMKGLPGShgtviesleslnnyfnssgidv |
| | protein | eekslfldiwrnwqkdgdmkilqsqiisfylrlfevlkdnqaisnnisvieshlittffsnsk |
| | | akkdafmsiakfevnnpqvqrqafnelirvvhqllpesslrkrkrsrcSGGPGPAGMKGLPGS |
| | | EVQLVESGGGLVQPGNSLRLSCAASGFTFSKFGMSWVRQAPGKGLEWVSSISGSGRDTLYAES |
| | | VKGRFTISRDNAKTTLYLQMNSLRPEDTAVYYCTIGGSLSVSSQGTLVTVSSSGGPGPAGMKG |
| | | LPGShgtviesleslnnyfnssgidveekslfldiwrnwqkdgdmkilqsqiisfylrlfevl |
| | | kdnqaisnnisvieshlittffsnskakkdafmsiakfevnnpqvqrqafnelirvvhqllpe |
| | | sslrkrkrsrcSGGPGPAGMKGLPGSEVQLVESGGGLVQPGNSLRLSCAASGFTFSKFGMSWV |
| | | RQAPGKGLEWVSSISGSGRDTLYAESVKGRFTISRDNAKTTLYLQMNSLRPEDTAVYYCTIGG |
| | | SLSVSSQGTLVTVSSHHHHHH |
| 96 | ACP56 | mdmrvpaqllgllllwlrgarcQVQLQESGGGLAQAGGSLSLSCAASGFTVSNSVMAWY |
| | Mouse IFG | RQTPGKQREFVAIINSVGSTNYADSVKGRFTISRDNAKNTVYLQMNNLKPEDT |
| | fusion | AVYVCNRNFDRIYWGQGTQVTVSSggggsggggsggggsEVQLVESGGGLVQPGNS |
| | protein | LRLSCAASGFTFSKFGMSWVRQAPGKGLEWVSSISGSGRDTLYAESVKGRFTI |
| | | SRDNAKTTLYLQMNSLRPEDTAVYYCTIGGSLSVSSQGTLVTVSSSGGPGPAG |
| | | MKGLPGShgtviesleslnnyfnssgidveekslfldiwrnwqkdgdmkilqsqiisfylrlf |
| | | evlkdnqaisnnisvieshlittffsnskakkdafmsiakfevnnpqvqrqafnelirvvhql |
| | | lpesslrkrkrsrcSGGPGPAGMKGLPGSEVQLVESGGGLVQPGNSLRLSCAASGFTFSKFGM |
| | | SWVRQAPGKGLEWVSSISGSGRDTLYAESVKGRFTISRDNAKTTLYLQMNSLRPEDTAVYYCT |
| | | IGGSLSVSSQGTLVTVSSHHHHHHEPEA |
| 97 | ACP57 | mdmrvpaqllgllllwlrgarcEVQLVESGGGLVQPGNSLRLSCAASGFTFSKFGMSWVR |
| | Mouse IFG | QAPGKGLEWVSSISGSGRDTLYAESVKGRFTISRDNAKTTLYLQMNSLRPEDT |
| | fusion | AVYYCTIGGSLSVSSQGTLVTVSSSGGPGPAGMKGLPGShgtviesleslnnyfnssgidv |
| | protein | eekslfldiwrnwqkdgdmkilqsqiisfylrlfevlkdnqaisnnisvieshlittffsnsk |
| | | akkdafmsiakfevnnpqvqrqafnelirvvhqllpesslrkrkrsrcSGGPGPAGMKGLPGS |
| | | EVQLVESGGGLVQPGNSLRLSCAASGFTFSKFGMSWVRQAPGKGLEWVSSISGSGRDTLYAES |
| | | VKGRFTISRDNAKTTLYLQMNSLRPEDTAVYYCTIGGSLSVSSQGTLVTVSSggggsggggsg |
| | | gggsQVQLQESGGGLAQAGGSLSLSCAASGFTVSNSVMAWYRQTPGKQREFVAIIN |
| | | SVGSTNYADSVKGRFTISRDNAKNTVYLQMNNLKPEDTAVYVCNRNFDRIY |
| | | WGQGTQVTVSSHHHHHHEPEA |
| 98 | ACP58 | mdmrvpaqllgllllwlrgarcEVQLVESGGGLVQPGNSLRLSCAASGFTFSKFGMSWVR |
| | Mouse IFG | QAPGKGLEWVSSISGSGRDTLYAESVKGRFTISRDNAKTTLYLQMNSLRPEDT |
| | fusion | AVYYCTIGGSLSVSSQGTLVTVSSSGGPGPAGMKGLPGShgtviesleslnnyfnssgidv |
| | protein | eekslfldiwrnwqkdgdmkilqsqiisfylrlfevlkdnqaisnnisvieshlittffsnsk |
| | | akkdafmsiakfevnnpqvqrqafnelirvvhqllpesslrkrkrsrcSGGPGPAGMKGLPGS |
| | | hgtviesleslnnyfnssgidveekslfldiwrnwqkdgdmkilqsqiisfylrlfevlkdnq |
| | | aisnnisvieshlittffsnskakkdafmsiakfevnnpqvqrqafnel |
| | | irvvhqllpesslrkrkrsrcSGGPGPAGMKGLPGSEVQLVESGGGLVQPGNSLRLSCAAS |
| | | GFTFSKFGMSWVRQAPGKGLEWVSSISGSGRDTLYAESVKGRFTISRDNAKTT |
| | | LYLQMNSLRPEDTAVYYCTIGGSLSVSSQGTLVTVSSggggsggggsggggsQVQLQ |
| | | ESGGGLVQAGGSLRLSCAASGRIFSIDIMSWYRQAPGKQRELVARITRGGTISY |
| | | DDSVKGRFTISRDNAKNTVYLQMNSLKPEDTGVYYCNALYGTDYWGKGTQV |
| | | TVSSHHHHHHEPEA |
| 99 | ACP59 | mdmrvpaqllgllllwlrgarcQVQLQESGGGLAQAGGSLSLSCAASGFTVSNSVMAWY |
| | Mouse IFG | RQTPGKQREFVAIINSVGSTNYADSVKGRFTISRDNAKNTVYLQMNNLKPEDT |
| | fusion | AVYVCNRNFDRIYWGQGTQVTVSSggggsggggsggggsEVQLVESGGGLVQPGNS |
| | protein | LRLSCAASGFTFSKFGMSWVRQAPGKGLEWVSSISGSGRDTLYAESVKGRFTI |
| | | SRDNAKTTLYLQMNSLRPEDTAVYYCTIGGSLSVSSQGTLVTVSSSGGPGPAG |
| | | MKGLPGShgtviesleslnnyfnssgidveekslfldiwrnwqkdgdmkilqsqiisfylrlf |
| | | evlkdnqaisnnisvieshlittffsnskakkdafmsiakfevnnpqvqrqafnelirvvhql |
| | | lpesslrkrkrsrcSGGPGPAGMKGLPGShgtviesleslnnyfnssgidveekslfldiw |
| | | rnwqkdgdmkilqsqiisfylrlfevlkdnqaisnnisvieshlittffsnskakkd |
| | | afmsiakfevnnpqvqrqafnelirwhqllpesslrkrkrsrcSGGPGPAGMKGLPGSEVQ |
| | | LVESGGGLVQPGNSLRLSCAASGFTFSKFGMSWVRQAPGKGLEWVSSISGSGR |
| | | DTLYAESVKGRFTISRDNAKTTLYLQMNSLRPEDTAVYYCTIGGSLSVSSQGT |
| | | LVTVSSHHHHHHEPEA |
| 100 | ACP60 | mdmrvpaqllgllllwlrgarcEVQLVESGGGLVQPGNSLRLSCAASGFTFSKFGMSWVR |
| | Mouse IFG | QAPGKGLEWVSSISGSGRDTLYAESVKGRFTISRDNAKTTLYLQMNSLRPEDT |
| | fusion | AVYYCTIGGSLSVSSQGTLVTVSSSGGPGPAGMKGLPGShgtviesleslnnyfnssgidv |
| | protein | eekslfldiwrnwqkdgdmkilqsqiisfylrlfevlkdnqaisnnisvieshlittffsnsk |
| | | akkdafmsiakfevnnpqvqrqafnelirvvhqllpesslrkrkrsrcSGGPGPAGMKGLPGS |
| | | hgtviesleslnnyfnssgidveekslfldiwrnwqkdgdmkilqsqiislylrlfevlkdnq |
| | | aisnnisvieshlittffsnskakkdafmsiakfevnnpqvqrqafnelirvvhqllpesslr |
| | | krkrsrcSGGPGPAGMKGLPGSEVQLVESGGGLVQPGNSLRLSCAASGFTFSKFGMSWVRQAP |
| | | GKGLEWVSSISGSGRDTLYAESVKGRFTISRDNAKTTLYLQMNSLRPEDTAVYYCTIGGSLSV |
| | | SSQGTLVTVSSggggsggggsggggsQVQLQESGGGLAQAGGSLSLSCAASGFTVSNSVMAWY |
| | | RQTPGKQREFVAIINSVGSTNYADSVKGRFTISRDNAKNTVYLQMNNLKPEDTAVYVCNRNFD |
| | | RIYWGQGTQVTVSSHHHHHHEPEA |
| 101 | ACP61 | mdmrvpaqllgllllwlrgarcEVQLVESGGGLVQPGNSLRLSCAASGFTFSKFGMSWVR |
| | Mouse IFG | QAPGKGLEWVSSISGSGRDTLYAESVKGRFTISRDNAKTTLYLQMNSLRPEDT |
| | fusion | AVYYCTIGGSLSVSSQGTLVTVSSSGGPGPAGMKGLPGShgtviesleslnnyfnssgidv |
| | protein | eekslfldiwrnwqkdgdmkilqsqiislylrlfevlkdnqaisnnisvieshlittffsnsk |
| | | akkdafmsiakfevnnpqvqrqafnelirvvhqllpesslrkrkrsrcSGGPGPAGMKGLPGS |
| | | hgtviesleslnnyfnssgidveekslfldiwrnwqkdgdmkilqsqiislylrlfevlkdnq |
| | | aisnnisvieshlittffsnskakkdafmsiakfevnnpqvqrqafnelirvvhqllpesslr |
| | | krkrsrcSGGPGPAGMKGLPGSEVQLVESGGGLVQPGNSLRLSCAASGFTFSKFGMSWVRQAP |
| | | GKGLEWVSSISGSGRDTLYAESVKGRFTISRDNAKTTLYLQMNSLRPEDTAVYYCTIGGSLSV |
| | | SSQGTLVTVSSggggsggggsggggsEVQLVESGGGLVQPGGSLRLSCAASGFTFSSYAMSWV |
| | | RQAPGKGLEWVSAISGSGGSTYYADSVKGRFTISRDNSKNTLYLQMNSLRAEDTAVYYCARGV |
| | | GAFRPYRKHEWGQGTLVTVSRggggsggggsggggsSSELTQDPAVSVALGQTVRITCQGDSL |
| | | RSYYASWYQQKPGQAPVLVIYGKNNRPSGIPDRFSGSSSGNTASLTTTGAQAEDEA |
| | | DYYCNSSPFEHNLVVFGGGTKLTVLHHHHHHEPEA |
| 102 | ACP63 | mdmrvpaqllgllllwlrgarcEVQLVESGGGLVQPGGSLRLSCAASGFTFSSYAMSWVR |
| | Anti-FN | QAPGKGLEWVSAISGSGGSTYYADSVKGRFTISRDNSKNTLYLQMNSLRAED |
| | CGS-2 | TAVYYCARGVGAFRPYRKHEWGQGTLVTVSRggggsggggsggggsSSELTQDPAV |
| | scFv | SVALGQTVRITCQGDSLRSYYASWYQQKPGQAPVLVIYGKNNRPSGIPDRFSG |
| | | SSSGNTASLTTTGAQAEDEADYYCNSSPFEHNLVVFGGGTKLTVLHHHHHHE |
| | | PEA |
| 103 | ACP69 | mdmrvpaqllgllllwlrgarcEVQLVESGGGLVQPGNSLRLSCAASGFTFSKFGMSWVR |
| | Mouse IFG | QAPGKGLEWVSSISGSGRDTLYAESVKGRFTISRDNAKTTLYLQMNSLRPEDT |
| | fusion | AVYYCTIGGSLSVSSQGTLVTVSSSGGPGPAGMKGLPGShgtviesleslnnyfnssgidv |
| | protein | eekslfldiwrnwqkdgdmkilqsqiislylrlfevlkdnqaisnnisvieshlittffsnsk |
| | | akkdafmsiakfevnnpqvqrqafnelirvvhqllpesslrkrkrsrcSGGPGPAGMKGLPGS |
| | | NEVQLVESGGGLVQPGSLRLSCAASGFTFSKFGMSWVRQAPGKGLEWVSSISGSGRDTLYAES |
| | | VKGRFTISRDNAKTTLYLQMNSLRPEDTAVYYCTIGGSLSVSSQGTLVTVSSSGGPGPAGMKG |
| | | LPGShgtviesleslnnyfnssgidveekslfldiwrnwqkdgdmkilqsqiisfylrlfevl |
| | | kdnqaisnnisvieshlittffsnskakkdafmsiakfevnnpqvqrqafnelirvvhqll |
| | | pesslrkrkrsrcHHHHHHEPEA |
| 104 | ACP70 | mdmrvpaqllgllllwlrgarchgtviesleslnnyfnssgidveekslfldiwrnwqkdgdm |
| | Mouse IFG | kilqsqiisfylrlfevlkdnqaisnnisvieshlittffsnskakkdafmsiakfevnnpqv |
| | fusion | qrqafnelirvvhqllpesslrkrkrsrcSGGPGPAGMKGLPGSEVQLVESGGGLVQPGNSLR |
| | protein | LSCAASGFTFSKFGMSWVRQAPGKGLEWVSSISGSGRDTLYAESVKGRFTISRDNAKTTLYLQ |
| | | MNSLRPEDTAVYYCTIGGSLSVSSQGTLVTVSSSGGPGPAGMKGLPGShgtviesleslnnyf |
| | | nssgidveekslfldiwrnwqkdgdmkilqsqiisfylrlfevlkdnqaisnnisvieshlit |
| | | tffsnskakkdafmsiakfevnnpqvqrqafnelirvvhqllpesslrkrkrsrcSGGPGPAG |
| | | MKGLPGSEVQLVESGGGLVQPGNSLRLSCAASGFTFSKFGMSWVRQAPGKGLEWVSSISGSGR |
| | | DTLYAESVKGRFTISRDNAKTTLYLQMNSLRPEDTAVYYCTIGGSLSVSSQGTLVTVSSHHHH |
| | | HHEPEA |
| 105 | ACP71 | mdmrvpaqllgllllwlrgarchgtviesleslnnyfnssgidveekslfldiwrnwqkdgdm |
| | Mouse IFG | kilqsqiisfylrlfevlkdnqaisnnisvieshlittffsnskakkdafmsiakfevnnpqv |
| | fusion | qrqafnelirvvhqllpesslrkrkrsrcSGGPGPAGMKGLPGSEAHKSEIAHRYNDLGEQHF |
| | protein | KGLVLIAFSQYLQKCSYDEHAKLVQEVTDFAKTCVADESAANCDKSLHTLFGDKLCAIPNLRE |
| | | NYGELADCCTKQEPERNECFLQHKDDNPSLPPFERPEAEAMCTSFKENPTTFMGHYLHEVARR |
| | | HPYFYAPELLYYAEQYNEILTQCCAEADKESCLTPKLDGVKEKALVSSVRQRMKC |
| | | SSMQKFGERAFKAWAVARLSQTFPNADFAEITKLATDLTKVNKECCHGDLLE |
| | | CADDRAELAKYMCENQATISSKLQTCCDKPLLKKAHCLSEVEHDTMPADLPA |
| | | IAADFVEDQEVCKNYAEAKDVFLGTFLYEYSRRHPDYSVSLLLRLAKKYEAT |
| | | LEKCCAEANPPACYGTVLAEFQPLVEEPKNLVKTNCDLYEKLGEYGFQNAILV |
| | | RYTQKAPQVSTPTLVEAARNLGRVGTKCCTLPEDQRLPCVEDYLSAILNRVCL |
| | | LHEKTPVSEHVTKCCSGSLVERRPCFSALTVDETYVPKEFKAETFTFHSDICTL |
| | | PEKEKQIKKQTALAELVKHKPKATAEQLKTVMDDFAQFLDTCCKAADKDTCF |
| | | STEGPNLVTRCKDALASGGPGPAGMKGLPGShgtviesleslnnyfnssgidveekslfldiw |
| | | rnwqkdgdmkilqsqiisfylrlfevlkdnqaisnnisvieshlittffsnskakkdafmsia |
| | | kfevnnpqvqrqafnelirvvhqllpesslrkrkrsrcSGGPGPAGMKGLPGSEAHKSEIAHR |
| | | YNDLGEQHFKGLVLIAFSQYLQKCSYDEHAKLVQEVTDFAKTCVADESAANCDKSLHTLFGDK |
| | | LCAIPNLRENYGELADCCTKQEPERNECFLQHKDDNPSLPPFERPEAEAMCTSFKENPT |
| | | TFMGHYLHEVARRHPYFYAPELLYYAEQYNEILTQCCAEADKESCLTPKLDG |
| | | VKEKALVSSVRQRMKCSSMQKFGERAFKAWAVARLSQTFPNADFAEITKLAT |
| | | DLTKVNKECCHGDLLECADDRAELAKYMCENQATISSKLQTCCDKPLLKKAH |
| | | CLSEVEHDTMPADLPAIAADFVEDQEVCKNYAEAKDVFLGTFLYEYSRRHPD |
| | | YSVSLLLRLAKKYEATLEKCCAEANPPACYGTVLAEFQPLVEEPKNLVKTNC |
| | | DLYEKLGEYGFQNAILVRYTQKAPQVSTPTLVEAARNLGRVGTKCCTLPEDQ |
| | | RLPCVEDYLSAILNRVCLLHEKTPVSEHVTKCCSGSLVERRPCFSALTVDETYV |
| | | PKEFKAETFTFHSDICTLPEKEKQIKKQTALAELVKHKPKATAEQLKTVMDDF |
| | | AQFLDTCCKAADKDTCFSTEGPNLVTRCKDALAHHHHHHEPEA |
| 106 | ACP72 | mdmrvpaqllgllllwlrgarcEAHKSEIAHRYNDLGEQHFKGLVLIAFSQYLQKCSYDE |
| | Mouse IFG | HAKLVQEVTDFAKTCVADESAANCDKSLHTLFGDKLCAIPNLRENYGELADC |
| | fusion | CTKQEPERNECFLQHKDDNPSLPPFERPEAEAMCTSFKENPTTFMGHYLHEVA |
| | protein | RRHPYFYAPELLYYAEQYNEILTQCCAEADKESCLTPKLDGVKEKALVSSVRQ |
| | | RMKCSSMQKFGERAFKAWAVARLSQTFPNADFAEITKLATDLTKVNKECCH |
| | | GDLLECADDRAELAKYMCENQATISSKLQTCCDKPLLKKAHCLSEVEHDTMP |
| | | ADLPAIAADFVEDQEVCKNYAEAKDVFLGTFLYEYSRRHPDYSVSLLLRLAK |
| | | KYEATLEKCCAEANPPACYGTVLAEFQPLVEEPKNLVKTNCDLYEKLGEYGF |
| | | QNAILVRYTQKAPQVSTPTLVEAARNLGRVGTKCCTLPEDQRLPCVEDYLSAI |
| | | LNRVCLLHEKTPVSEHVTKCCSGSLVERRPCFSALTVDETYVPKEFKAETFTFH |
| | | SDICTLPEKEKQIKKQTALAELVKHKPKATAEQLKTVMDDFAQFLDTCCKAA |
| | | DKDTCFSTEGPNLVTRCKDALASGGPGPAGMKGLPGShgtviesleslnnyfnssgidvee |
| | | kslfldiwrnwqkdgdmkilqsqiislylrlfevlkdnqaisnnisvieshlittffsnskak |
| | | kdafmsiakfevnnpqvqrqafnelirvvhqllpesslrkrkrsrcSGGPGPAGMKGLPGSEA |
| | | HKSEIAHRYNDLGEQHFKGLVLIAFSQYLQKCSYDEHAKLVQEVTDFAKTCVADESAANCDKS |
| | | LHTLFGDKLCAIPNLRENYGELADCCTKQEPERNECFLQHKDDNPSLPPFERPEAEAMCT |
| | | SFKENPTTFMGHYLHEVARRHPYFYAPELLYYAEQYNEILTQCCAEADKESCL |
| | | TPKLDGVKEKALVSSVRQRMKCSSMQKFGERAFKAWAVARLSQTFPNADFA |
| | | EITKLATDLTKVNKECCHGDLLECADDRAELAKYMCENQATISSKLQTCCDK |
| | | PLLKKAHCLSEVEHDTMPADLPAIAADFVEDQEVCKNYAEAKDVFLGTFLYE |
| | | YSRRHPDYSVSLLLRLAKKYEATLEKCCAEANPPACYGTVLAEFQPLVEEPKN |
| | | LVKTNCDLYEKLGEYGFQNAILVRYTQKAPQVSTPTLVEAARNLGRVGTKCC |
| | | TLPEDQRLPCVEDYLSAILNRVCLLHEKTPVSEHVTKCCSGSLVERRPCFSALT |
| | | VDETYVPKEFKAETFTFHSDICTLPEKEKQIKKQTALAELVKHKPKATAEQLK |
| | | TVMDDFAQFLDTCCKAADKDTCFSTEGPNLVTRCKDALASGGPGPAGMKGL |
| | | PGShgtviesleslnnyfnssgidveekslfldiwrnwqkdgdmkilqsqiislylrl |
| | | fevlkdnqaisnnisvieshlittffsnskakkdafmsiakfevnnpqvqrqa |
| | | fnelirvvhqllpesslrkrkrsrcHHHHHHEPEA |
| 107 | ACP73 | mdmrvpaqllgllllwlrgarcEAHKSEIAHRYNDLGEQHFKGLVLIAFSQYLQKCSYDE |
| | Mouse IFG | HAKLVQEVTDFAKTCVADESAANCDKSLHTLFGDKLCAIPNLRENYGELADC |
| | fusion | CTKQEPERNECFLQHKDDNPSLPPFERPEAEAMCTSFKENPTTFMGHYLHEVA |
| | protein | RRHPYFYAPELLYYAEQYNEILTQCCAEADKESCLTPKLDGVKEKALVSSVRQ |
| | | RMKCSSMQKFGERAFKAWAVARLSQTFPNADFAEITKLATDLTKVNKECCH |
| | | GDLLECADDRAELAKYMCENQATISSKLQTCCDKPLLKKAHCLSEVEHDTMP |
| | | ADLPAIAADFVEDQEVCKNYAEAKDVFLGTFLYEYSRRHPDYSVSLLLRLAK |
| | | KYEATLEKCCAEANPPACYGTVLAEFQPLVEEPKNLVKTNCDLYEKLGEYGF |
| | | QNAILVRYTQKAPQVSTPTLVEAARNLGRVGTKCCTLPEDQRLPCVEDYLSAI |
| | | LNRVCLLHEKTPVSEHVTKCCSGSLVERRPCFSALTVDETYVPKEFKAETFTFH |
| | | SDICTLPEKEKQIKKQTALAELVKHKPKATAEQLKTVMDDFAQFLDTCCKAA |
| | | DKDTCFSTEGPNLVTRCKDALASGGPGPAGMKGLPGShgtviesleslnnyfnssgidvee |
| | | kslfldiwrnwqkdgdmkilqsqiislylrlfevlkdnqaisnnisvieshlittffsnskak |
| | | kdafmsiakfevnnpqvqrqafnelirvvhqllpesslrkrkrsrcSGGPGPAGMKGLPGSEA |
| | | HKSEIAHRYNDLGEQHFKGLVLIAFSQYLQKCSYDEHAKLVQEVTDFAKTCVADESAANCDKS |
| | | LHTLFGDKLCAIPNLRENYGELADCCTKQEPERNECFLQHKDDNPSLPPFERPEAEAMCT |
| | | SFKENPTTFMGHYLHEVARRHPYFYAPELLYYAEQYNEILTQCCAEADKESCL |
| | | TPKLDGVKEKALVSSVRQRMKCSSMQKFGERAFKAWAVARLSQTFPNADFA |
| | | EITKLATDLTKVNKECCHGDLLECADDRAELAKYMCENQATISSKLQTCCDK |
| | | PLLKKAHCLSEVEHDTMPADLPAIAADFVEDQEVCKNYAEAKDVFLGTFLYE |
| | | YSRRHPDYSVSLLLRLAKKYEATLEKCCAEANPPACYGTVLAEFQPLVEEPKN |
| | | LVKTNCDLYEKLGEYGFQNAILVRYTQKAPQVSTPTLVEAARNLGRVGTKCC |
| | | TLPEDQRLPCVEDYLSAILNRVCLLHEKTPVSEHVTKCCSGSLVERRPCFSALT |
| | | VDETYVPKEFKAETFTFHSDICTLPEKEKQIKKQTALAELVKHKPKATAEQLK |
| | | TVMDDFAQFLDTCCKAADKDTCFSTEGPNLVTRCKDALASGGPGPAGMKGL |
| | | PGShgtviesleslnnyfnssgidveekslfldiwrnwqkdgdmkilqsqiisfylrlfevlk |
| | | dnqaisnnisvieshlittffsnskakkdafmsiakfevnnpqvqrqafnelirvvhqllpes |
| | | slrkrkrsrcSGGPGPAGMKGLPGSEAHKSEIAHRYNDLGEQHFKGLVLIAFSQYLQKCSYDE |
| | | HAKLVQEVTDFAKTCVADESAANCDKSLHTLFGDKLCAIPNLRENYGELADCCTKQEPERNEC |
| | | FLQHKDDNPSLPPFERPEAEAMCTSFKENPTTFMGHYLHEVARRHPYFYAPELLYYAE |
| | | QYNEILTQCCAEADKESCLTPKLDGVKEKALVSSVRQRMKCSSMQKFGERAF |
| | | KAWAVARLSQTFPNADFAEITKLATDLTKVNKECCHGDLLECADDRAELAKY |
| | | MCENQATISSKLQTCCDKPLLKKAHCLSEVEHDTMPADLPAIAADFVEDQEV |
| | | CKNYAEAKDVFLGTFLYEYSRRHPDYSVSLLLRLAKKYEATLEKCCAEANPP |
| | | ACYGTVLAEFQPLVEEPKNLVKTNCDLYEKLGEYGFQNAILVRYTQKAPQVS |
| | | TPTLVEAARNLGRVGTKCCTLPEDQRLPCVEDYLSAILNRVCLLHEKTPVSEH |
| | | VTKCCSGSLVERRPCFSALTVDETYVPKEFKAETFTFHSDICTLPEKEKQIKKQ |
| | | TALAELVKHKPKATAEQLKTVMDDFAQFLDTCCKAADKDTCFSTEGPNLVTR |
| | | CKDALAHHHHHHEPEA |
| 108 | ACP74 | mdmrvpaqllgllllwlrgarcEAHKSEIAHRYNDLGEQHFKGLVLIAFSQYLQKCSYDE |
| | Mouse IFG | HAKLVQEVTDFAKTCVADESAANCDKSLHTLFGDKLCAIPNLRENYGELADC |
| | fusion | CTKQEPERNECFLQHKDDNPSLPPFERPEAEAMCTSFKENPTTFMGHYLHEVA |
| | protein | RRHPYFYAPELLYYAEQYNEILTQCCAEADKESCLTPKLDGVKEKALVSSVRQ |
| | | RMKCSSMQKFGERAFKAWAVARLSQTFPNADFAEITKLATDLTKVNKECCH |
| | | GDLLECADDRAELAKYMCENQATISSKLQTCCDKPLLKKAHCLSEVEHDTMP |
| | | ADLPAIAADFVEDQEVCKNYAEAKDVFLGTFLYEYSRRHPDYSVSLLLRLAK |
| | | KYEATLEKCCAEANPPACYGTVLAEFQPLVEEPKNLVKTNCDLYEKLGEYGF |
| | | QNAILVRYTQKAPQVSTPTLVEAARNLGRVGTKCCTLPEDQRLPCVEDYLSAI |
| | | LNRVCLLHEKTPVSEHVTKCCSGSLVERRPCFSALTVDETYVPKEFKAETFTFH |
| | | SDICTLPEKEKQIKKQTALAELVKHKPKATAEQLKTVMDDFAQFLDTCCKAA |
| | | DKDTCFSTEGPNLVTRCKDALASGGPGPAGMKGLPGShgtviesleslnnyfnssgidvee |
| | | kslfldiwrnwqkdgdmkilqsqiisfylrlfevlkdnqaisnnisvieshlittffsnskak |
| | | kdafmsiakfevnnpqvqrqafnelirvvhqllpesslrkrkrsrcSGGPGPAGMKGLPGSgg |
| | | ggsEAHKSEIAHRYNDLGEQHFKGLVLIAFSQYLQKCSYDEHAKLVQEVTDFAKTCVADESAA |
| | | NCDKSLHTLFGDKLCAIPNLRENYGELADCCTKQEPERNECFLQHKDDNPSLPPFERPEAEA |
| | | MCTSFKENPTTFMGHYLHEVARRHPYFYAPELLYYAEQYNEILTQCCAEADK |
| | | ESCLTPKLDGVKEKALVSSVRQRMKCSSMQKFGERAFKAWAVARLSQTFPN |
| | | ADFAEITKLATDLTKVNKECCHGDLLECADDRAELAKYMCENQATISSKLQT |
| | | CCDKPLLKKAHCLSEVEHDTMPADLPAIAADFVEDQEVCKNYAEAKDVFLGT |
| | | FLYEYSRRHPDYSVSLLLRLAKKYEATLEKCCAEANPPACYGTVLAEFQPLVE |
| | | EPKNLVKTNCDLYEKLGEYGFQNAILVRYTQKAPQVSTPTLVEAARNLGRVG |
| | | TKCCTLPEDQRLPCVEDYLSAILNRVCLLHEKTPVSEHVTKCCSGSLVERRPCF |
| | | SALTVDETYVPKEFKAETFTFHSDICTLPEKEKQIKKQTALAELVKHKPKATAE |
| | | QLKTVMDDFAQFLDTCCKAADKDTCFSTEGPNLVTRCKDALAggggsSGGPGP |
| | | AGMKGLPGShgtviesleslnnyfnssgidveekslfldiwrnwqkdgdmkilqsqiisfylr |
| | | lfevlkdnqaisnnisvieshlittffsnskakkdafmsiakfevnnpqvqrqafnelirvvh |
| | | qllpesslrkrkrsrcSGGPGPAGMKGLPGSEAHKSEIAHRYNDLGEQHFKGLVLIAFSQYLQ |
| | | KCSYDEHAKLVQEVTDFAKTCVADESAANCDKSLHTLFGDKLCAIPNLRENYGELADCCTKQE |
| | | PERNECFLQHKDDNPSLPPFERPEAEAMCTSFKENPTTFMGHYLHEVARRHPYFYAPEL |
| | | LYYAEQYNEILTQCCAEADKESCLTPKLDGVKEKALVSSVRQRMKCSSMQKF |
| | | GERAFKAWAVARLSQTFPNADFAEITKLATDLTKVNKECCHGDLLECADDRA |
| | | ELAKYMCENQATISSKLQTCCDKPLLKKAHCLSEVEHDTMPADLPAIAADFVE |
| | | DQEVCKNYAEAKDVFLGTFLYEYSRRHPDYSVSLLLRLAKKYEATLEKCCAE |
| | | ANPPACYGTVLAEFQPLVEEPKNLVKTNCDLYEKLGEYGFQNAILVRYTQKA |
| | | PQVSTPTLVEAARNLGRVGTKCCTLPEDQRLPCVEDYLSAILNRVCLLHEKTP |
| | | VSEHVTKCCSGSLVERRPCFSALTVDETYVPKEFKAETFTFHSDICTLPEKEKQI |
| | | KKQTALAELVKHKPKATAEQLKTVMDDFAQFLDTCCKAADKDTCFSTEGPN |
| | | LVTRCKDALAHHHHHHEPEA |
| 109 | ACP75 | mdmrvpaqllgllllwlrgarcEAHKSEIAHRYNDLGEQHFKGLVLIAFSQYLQKCSYDE |
| | Mouse IFG | HAKLVQEVTDFAKTCVADESAANCDKSLHTLFGDKLCAIPNLRENYGELADC |
| | fusion | CTKQEPERNECFLQHKDDNPSLPPFERPEAEAMCTSFKENPTTFMGHYLHEVA |
| | protein | RRHPYFYAPELLYYAEQYNEILTQCCAEADKESCLTPKLDGVKEKALVSSVRQ |
| | | RMKCSSMQKFGERAFKAWAVARLSQTFPNADFAEITKLATDLTKVNKECCH |
| | | GDLLECADDRAELAKYMCENQATISSKLQTCCDKPLLKKAHCLSEVEHDTMP |
| | | ADLPAIAADFVEDQEVCKNYAEAKDVFLGTFLYEYSRRHPDYSVSLLLRLAK |
| | | KYEATLEKCCAEANPPACYGTVLAEFQPLVEEPKNLVKTNCDLYEKLGEYGF |
| | | QNAILVRYTQKAPQVSTPTLVEAARNLGRVGTKCCTLPEDQRLPCVEDYLSAI |
| | | LNRVCLLHEKTPVSEHVTKCCSGSLVERRPCFSALTVDETYVPKEFKAETFTFH |
| | | SDICTLPEKEKQIKKQTALAELVKHKPKATAEQLKTVMDDFAQFLDTCCKAA |
| | | DKDTCFSTEGPNLVTRCKDALASGGPGPAGMKGLPGShgtviesleslnnyfnssgidvee |
| | | kslfldiwrnwqkdgdmkilqsqiislylrlfevlkdnqaisnnisvieshlittffsnskak |
| | | kdafmsiakfevnnpqvqrqafnelirvvhqllpesslrkrkrsrcSGGPGPAGMKGLPGSgg |
| | | ggsggggsEAHKSEIAHRYNDLGEQHFKGLVLIAFSQYLQKCSYDEHAKLVQEVTDFAKTCVA |
| | | DESAANCDKSLHTLFGDKLCAIPNLRENYGELADCCTKQEPERNECFLQHKDDNPSLPPFERP |
| | | EAEAMCTSFKENPTTFMGHYLHEVARRHPYFYAPELLYYAEQYNEILTQCCAE |
| | | ADKESCLTPKLDGVKEKALVSSVRQRMKCSSMQKFGERAFKAWAVARLSQT |
| | | FPNADFAEITKLATDLTKVNKECCHGDLLECADDRAELAKYMCENQATISSKL |
| | | QTCCDKPLLKKAHCLSEVEHDTMPADLPAIAADFVEDQEVCKNYAEAKDVFL |
| | | GTFLYEYSRRHPDYSVSLLLRLAKKYEATLEKCCAEANPPACYGTVLAEFQPL |
| | | VEEPKNLVKTNCDLYEKLGEYGFQNAILVRYTQKAPQVSTPTLVEAARNLGR |
| | | VGTKCCTLPEDQRLPCVEDYLSAILNRVCLLHEKTPVSEHVTKCCSGSLVERR |
| | | PCFSALTVDETYVPKEFKAETFTFHSDICTLPEKEKQIKKQTALAELVKHKPKA |
| | | TAEQLKTVMDDFAQFLDTCCKAADKDTCFSTEGPNLVTRCKDALAggggsgggg |
| | | sSGGPGPAGMKGLPGShgtviesleslnnyfnssgidveekslfldiwrnwqkdgdmkilqs |
| | | qiislylrlfevlkdnqaisnnisvieshlittffsnskakkdafmsiakfevnnpqvqrqa |
| | | fnelirvvhqllpesslrkrkrsrcSGGPGPAGMKGLPGSEAHKSEIAHRYNDLGEQHFKGL |
| | | VLIAFSQYLQKCSYDEHAKLVQEVTDFAKTCVADESAANCDKSLHTLFGDKLCAIPNLRENY |
| | | GELADCCTKQEPERNECFLQHKDDNPSLPPFERPEAEAMCTSFKENPTTFMGHYLHEVARRH |
| | | PYFYAPELLYYAEQYNEILTQCCAEADKESCLTPKLDGVKEKALVSSVRQRM |
| | | KCSSMQKFGERAFKAWAVARLSQTFPNADFAEITKLATDLTKVNKECCHGDL |
| | | LECADDRAELAKYMCENQATISSKLQTCCDKPLLKKAHCLSEVEHDTMPADL |
| | | PAIAADFVEDQEVCKNYAEAKDVFLGTFLYEYSRRHPDYSVSLLLRLAKKYE |
| | | ATLEKCCAEANPPACYGTVLAEFQPLVEEPKNLVKTNCDLYEKLGEYGFQNAI |
| | | LVRYTQKAPQVSTPTLVEAARNLGRVGTKCCTLPEDQRLPCVEDYLSAILNRV |
| | | CLLHEKTPVSEHVTKCCSGSLVERRPCFSALTVDETYVPKEFKAETFTFHSDIC |
| | | TLPEKEKQIKKQTALAELVKHKPKATAEQLKTVMDDFAQFLDTCCKAADKDT |
| | | CFSTEGPNLVTRCKDALAHHHHHHEPEA |
| 110 | ACP78 | mdmrvpaqllgllllwlrgarcEVQLVESGGGLVQPGNSLRLSCAASGFTFSKFGMSWVR |
| | Mouse IFG | QAPGKGLEWVSSISGSGRDTLYAESVKGRFTISRDNAKTTLYLQMNSLRPEDT |
| | fusion | AVYYCTIGGSLSVSSQGTLVTVSSggggsggggsggggshgtviesleslnnyfnssgidve |
| | protein | ekslfldiwrnwqkdgdmkilqsqiisfylrlfevlkdnqaisnnisvieshlittffsnsk |
| | | akkdafmsiakfevnnpqvqrqafnelirvvhqllpesslrkrkrsrcggggsggggsgggg |
| | | sEVQLVESGGGLVQPGNSLRLSCAASGFTFSKFGMSWVRQAPGKGLEWVSSISGSGRDTLYA |
| | | ESVKGRFTISRDNAKTTLYLQMNSLRPEDTAVYYCTIGGSLSVSSQGTLVTVSSggggsggg |
| | | gsggggshgtviesleslnnyfnssgidveekslfldiwrnwqkdgdmkilqsqiisfylrl |
| | | fevlkdnqaisnnisvieshlittffsnskakkdafmsiakfevnnpqvqrqafnelirvvh |
| | | qllpesslrkrkrsrcggggsggggsggggsEVQLVESGGGLVQPGNSLRLSCAASGFTFSK |
| | | FGMSWVRQAPGKGLEWVSSISGSGRDTLYAESVKGRFTISRDNAKTTLYLQMNSLRPEDTAV |
| | | YYCTIGGSLSVSSQGTLVTVSSHHHHHHEPEA |
| 111 | ACP134 | mdmrvpaqllgllllwlrgarcEVQLVESGGGLVQPGNSLRLSCAASGFTFSKFGMSWVR |
| | Mouse IFG | QAPGKGLEWVSSISGSGRDTLYAESVKGRFTISRDNAKTTLYLQMNSLRPEDT |
| | fusion | AVYYCTIGGSLSVSSQGTLVTVSSSGGPGPAGMKGLPGShgtviesleslnnyfnssgidv |
| | protein | eekslfldiwrnwqkdgdmkilqsqiisfylrlfevlkdnqaisnnisvieshlittffsnsk |
| | | akkdafmsiakfevnnpqvqrqafnelirvvhqllpesslrkrkrsrcSGGPGPAGMKGLPGS |
| | | EVQLVESGGGLVQPGNSLRLSCAASGFTFSKFGMSWVRQAPGKGLEWVSSISGSGRDTLYAES |
| | | VKGRFTISRDNAKTTLYLQMNSLRPEDTAVYYCTIGGSLSVSSQGTLVTVSSSGGPGPAGM |
| | | KGLPGShgtviesleslnnyfnssgidveekslfldiwrnwqkdgdmkilqsqiislylrlfe |
| | | vlkdnqaisnnisvieshlittffsnskakkdafmsiakfevnnpqvqrqafnelirvvhqll |
| | | pesslrkrkrsrcSGGPGPAGMKGLPGSEVQLVESGGGLVQPGNSLRLSCAASGFTFSKFGMS |
| | | WVRQAPGKGLEWVSSISGSGRDTLYAESVKGRFTISRDNAKTTLYLQMNSLRPEDTAVYYCTI |
| | | GGSLSVSSQGTLVTVSSggggsggggsggggsQVQLQESGGGLAQAGGSLSLSCAASGFTVSN |
| | | SVMAWYRQTPGKQREFVAIINSVGSTNYADSVKGRFTISRDNAKNTVYLQMNN |
| | | LKPEDTAVYVCNRNFDRIYWGQGTQVTVSSHHHHHHEPEA |
| 112 | ACP135 | mdmrvpaqllgllllwlrgarcQVQLQESGGGLAQAGGSLSLSCAASGFTVSNSVMAWY |
| | Mouse IFG | RQTPGKQREFVAIINSVGSTNYADSVKGRFTISRDNAKNTVYLQMNNLKPEDT |
| | fusion | AVYVCNRNFDRIYWGQGTQVTVSSggggsggggsggggsEVQLVESGGGLVQPGNS |
| | protein | LRLSCAASGFTFSKFGMSWVRQAPGKGLEWVSSISGSGRDTLYAESVKGRFTI |
| | | SRDNAKTTLYLQMNSLRPEDTAVYYCTIGGSLSVSSQGTLVTVSSSGGPGPAG |
| | | MKGLPGShgtviesleslnnyfnssgidveekslfldiwrnwqkdgdmkilqsqiisfylrlf |
| | | evlkdnqaisnnisvieshlittffsnskakkdafmsiakfevnnpqvqrqafnelirvvhql |
| | | lpesrsrcSGGPGPAGMKGLPGSEVQLVESGGGLVQPGNSLRLSCAASGFTFSKFGMSWVRQA |
| | | PGKGLEWVSSlslrkrkSGSGRDTLYAESVKGRFTISRDNAKTTLYLQMNSLRPEDTAVYYCT |
| | | IGGSLSVSSQGTLVTVSSSGGPGPAGMKGLPGShgtviesleslnnyfnssgidveekslfld |
| | | iwrnwqkdgdmkilqsqiisfylrlfevlkdnqaisnnisvieshlittffsnskakkdafms |
| | | iakfevnnpqvqrqafnelirvvhqllpesslrkrkrsrcSGGPGPAGMKGLPGSEVQLVESG |
| | | GGLVQPGNSLRLGSCAASGFTFSKFMSWVRQAPGKGLEWVSSISGSGRDTLYAESVKGRFTIS |
| | | RDNAKTTLYLQMNSLRPEDTAVYYCTIGGSLSVSSQGTLVTVSSHHHHHHEPEA |
| 113 | ACP34 | mdmrvpaqllgllllwlrgarcrvipvsgparclsqsrnllkttddmvktareklkhysctae |
| | Mouse IL- | didheditrdqtstlktclplelhknesclatretssttrgsclppqktslmmtlclgsiyed |
| | 12 fusion | lkmyqtefqainaalqnhnhqqiildkgmlvaidelmqslnhngetlrqkppvgeadpyrvkm |
| | protein | klcillhafstrvvtinrvmgylssaSGGPGPAGMKGLPGSmwelekdvyvvevdwtpdapge |
| | | tvnltcdtpeedditwtsdqrhgvigsgktltitvkefldagqytchkggetlshshlllhkk |
| | | engiwsteilknfknktflkceapnysgrftcswlvqrnmdlkfnikssssspdsravtcgma |
| | | slsaekvtldqrdyekysvscqedvtcptaeetlpielalearqqnkyenystsffirdiikp |
| | | dppknlqmkplknsqvevsweypdswstphsyfslkffvriqrkkekmketeegcnqkgaflv |
| | | ektstevqckggnvcvqaqdryynsscskwacvpcrvrsHHHHHH |
| 114 | ACP35 | mdmrvpaqllgllllwlrgarcrvipvsgparclsqsrnllkttddmvktareklkhysctae |
| | Mouse IL- | didheditrdqtstlktclplelhknesclatretssttrgsclppqktslmmtlclgsiyed |
| | 12 fusion | lkmyqtefqainaalqnhnhqqiildkgmlvaidelmqslnhngetlrqkppvgeadpyrvkm |
| | protein | klcillhafstrvvtinrvmgylssaggggsggggsggggsSGGPGPAGMKGLPGSggggsgg |
| | | ggsggggsmwelekdvyvvevdwtpdapgetvnltcdtpeedditwtsdqrhgvigsgktlti |
| | | tvkefldagqytchkggetlshshlllhkkengiwsteilknfknktflkceapnysgrftcs |
| | | wlvqrnmdlkfnikssssspdsravtcgmaslsaekvtldqrdyekysvscqedvtcptaeet |
| | | lpielalearqqnkyenystsffirdiikpdppknlqmkplknsqvevsweypdswstphsyf |
| | | slkffvriqrkkekmketeegcnqkgaflvektstevqckggnvcvqaqdryynsscskwacv |
| | | pcrvrsHHHHHH |
| 115 | ACP36 | mdmrvpaqllgllllwlrgarcEVQLVESGGGLVQPGNSLRLSCAASGFTFSKFGMSWVR |
| | Mouse IL- | QAPGKGLEWVSSISGSGRDTLYAESVKGRFTISRDNAKTTLYLQMNSLRPEDT |
| | 12 fusion | AVYYCTIGGSLSVSSQGTLVTVSSSGGPGPAGMKGLPGSmwelekdvyvvevdwtpd |
| | protein | apgetvnltcdtpeedditwtsdqrhgvigsgktltitvkefldagqytchkggetlshshll |
| | | lhkkengiwsteilknfknktflkceapnysgrftcswlvqrnmdlkfnikssssspdsr |
| | | avtcgmaslsaekvtldqrdyekysvscqedvtcptaeetlpielalearqqnkyenyst |
| | | sffirdiikpdppknlqmkplknsqvevsweypdswstphsyfslkffvriqrkkekmkete |
| | | egcnqkgaflvektstevqckggnvcvqaqdryynsscskwacvpcrvrsggggsggggsgg |
| | | ggsrvipvsgparclsqsrnllkttddmvktareklkhysctaedidheditrdqts |
| | | tlktclplelhknesclatretssttrgsclppqktslmmtlclgsiyedlkmy |
| | | qtefqainaalqnhnhqqiildkgmlvaidelmqslnhngetlrqkppvgeadpyrvkmkl |
| | | cillhafstrvvtinrvmgylssaSGGPGPAGMKGLPGSEVQLVESGGGLVQPGNSLRLSC |
| | | AASGFTFSKFGMSWVRQAPGKGLEWVSSISGSGRDTLYAESVKGRFTISRDNA |
| | | KTTLYLQMNSLRPEDTAVYYCTIGGSLSVSSQGTLVTVSSHHHHHH |
| 116 | ACP37 | mdmrvpaqllgllllwlrgarcQVQLQESGGGLVQAGGSLRLSCAASGRIFSIDIMSWYR |
| | Mouse IL- | QAPGKQRELVARITRGGTISYDDSVKGRFTISRDNAKNTVYLQMNSLKPEDTG |
| | 12 fusion | VYYCNALYGTDYWGKGTQVTVSSggggsggggsggggsEVQLVESGGGLVQPGNS |
| | protein | LRLSCAASGFTFSKFGMSWVRQAPGKGLEWVSSISGSGRDTLYAESVKGRFTI |
| | | SRDNAKTTLYLQMNSLRPEDTAVYYCTIGGSLSVSSQGTLVTVSSSGGPGPAG |
| | | MKGLPGSmwelekdvyvvevdwtpdapgetvnltcdtpeedditwtsdqrhgvigsgktltitvkefldagqytc |
| | | hkggetlshshlllhkkengiwsteilknfknktflkceapnysgrftcswlvqrnmdlkfnikssssspdsravtcgmas |
| | | lsaekvtldqrdyekysvscqedvtcptaeetlpielalearqqnkyenystsffirdiikpdppknlqmkplknsqvevs |
| | | weypdswstphsyfslkffvriqrkkekmketeegcnqkgaflvektstevqckggnvcvqaqdryynsscskwac |
| | | vpcrvrsggggsggggsggggsrvipvsgparclsqsrnllkttddmvktareklkhysctaedidheditrdqtstlktcl |
| | | plelhknesclatretssttrgsclppqktslmmtlclgsiyedlkmyqtefqainaalqnhnhqqiildkgmlvaidelm |
| | | qslnhngetlrqkppvgeadpyrvkmklcillhafstrvvtinrvmgylssaSGGPGPAGMKGLPGSEVQ |
| | | LVESGGGLVQPGNSLRLSCAASGFTFSKFGMSWVRQAPGKGLEWVSSISGSGR |
| | | DTLYAESVKGRFTISRDNAKTTLYLQMNSLRPEDTAVYYCTIGGSLSVSSQGT |
| | | LVTVSSHHHHHH |
| 117 | ACP79 | mdmrvpaqllgllllwlrgarcQVQLQESGGGLVQAGGSLRLSCAASGRIFSIDIMSWYR |
| | Mouse IL- | QAPGKQRELVARITRGGTISYDDSVKGRFTISRDNAKNTVYLQMNSLKPEDTG |
| | 12 fusion | VYYCNALYGTDYWGKGTQVTVSSggggsggggsggggsEVQLVESGGGLVQPGNS |
| | protein | LRLSCAASGFTFSKFGMSWVRQAPGKGLEWVSSISGSGRDTLYAESVKGRFTI |
| | | SRDNAKTTLYLQMNSLRPEDTAVYYCTIGGSLSVSSQGTLVTVSSSGGPGPAG |
| | | MKGLPGSmwelekdvyvvevdwtpdapgetvnltcdtpeedditwtsdqrhgvigsgktltitvkefldagqytc |
| | | hkggetlshshlllhkkengiwsteilknfknktflkceapnysgrftcswlvqrnmdlkfnikssssspdsravtcgmas |
| | | lsaekvtldqrdyekysvscqedvtcptaeetlpielalearqqnkyenystsffirdiikpdppknlqmkplknsqvevs |
| | | weypdswstphsyfslkffvriqrkkekmketeegcnqkgaflvektstevqckggnvcvqaqdryynsscskwac |
| | | vpcrvrsggggsggggsggggsrvipvsgparclsqsrnllkttddmvktareklkhysctaedidheditrdqtstlktcl |
| | | plelhknesclatretssttrgsclppqktslmmtlclgsiyedlkmyqtefqainaalqnhnhqqiildkgmlvaidelm |
| | | qslnhngetlrqkppvgeadpyrvkmklcillhafstrwtinrvmgylssaSGGPGPAGMKGLPGSEVQ |
| | | LVESGGGLVQPGNSLRLSCAASGFTFSKFGMSWVRQAPGKGLEWVSSISGSGR |
| | | DTLYAESVKGRFTISRDNAKTTLYLQMNSLRPEDTAVYYCTIGGSLSVSSQGT |
| | | LVTVSSHHHHHH |
| 118 | ACP80 | mdmrvpaqllgllllwlrgarcEVQLVESGGGLVQPGNSLRLSCAASGFTFSKFGMSWVR |
| | Mouse IL- | QAPGKGLEWVSSISGSGRDTLYAESVKGRFTISRDNAKTTLYLQMNSLRPEDT |
| | 12 fusion | AVYYCTIGGSLSVSSQGTLVTVSSSGGPGPAGMKGLPGSmwelekdvyvvevdwtpd |
| | protein | apgetvnltcdtpeedditwtsdqrhgvigsgktltitvkefldagqytchkggetlshshlllhkkengiwsteilknfkn |
| | | ktflkceapnysgrftcswlvqrnmdlkfnikssssspdsravtcgmaslsaekvtldqrdyekysvscqedvtcptaee |
| | | tlpielalearqqnkyenystsffirdiikpdppknlqmkplknsqvevsweypdswstphsyfslkffvriqrkkekm |
| | | keteegcnqkgaflvektstevqckggnvcvqaqdryynsscskwacvpcrvrsggggsggggsggggsrvipvsg |
| | | parclsqsrnllkttddmvktareklkhysctaedidheditrdqtstlktclplelhknesclatretssttrgsclppqktsl |
| | | mmtlclgsiyedlkmyqtefqainaalqnhnhqqiildkgmlvaidelmqslnhngetlrqkppvgeadpyrvkmkl |
| | | cillhafstrvvtinrvmgylssaSGGPGPAGMKGLPGSEVQLVESGGGLVQPGNSLRLSC |
| | | AASGFTFSKFGMSWVRQAPGKGLEWVSSISGSGRDTLYAESVKGRFTISRDNA |
| | | KTTLYLQMNSLRPEDTAVYYCTIGGSLSVSSQGTLVTVSSggggsggggsggggsQV |
| | | QLQESGGGLVQAGGSLRLSCAASGRIFSIDIMSWYRQAPGKQRELVARITRGG |
| | | TISYDDSVKGRFTISRDNAKNTVYLQMNSLKPEDTGVYYCNALYGTDYWGK |
| | | GTQVTVSSHHHHHH |
| 119 | ACP91 | mdmrvpaqllgllllwlrgarciwelkkdvyvveldwypdapgemvvltcdtpeedgitwtldqssevlgsgktltiqv |
| | Chimeric | kefgdagqytchkggevlshsllllhkkedgiwstdilkdqkepknktflrceaknysgrftcwwlttistdltfsvkssrg |
| | IL-12 | ssdpqgvtcgaatlsaervrgdnkeyeysvecqedsacpaaeeslpievmvdavhklkyenytssffirdiikpdppkn |
| | fusion | lqlkplknsrqvevsweypdtwstphsyfsltfcvqvqgkskrekkdrvftdktsatvicrknasisvraqdryysssws |
| | protein | ewasvpcsggggsggggsggggsrvipvsgparclsqsmllkttddmvktareklkhysctaedidheditrdqtstlkt |
| | | clplelhknesclatretssttrgsclppqktslmmtlclgsiyedlkmyqtefqainaalqnhnhqqiildkgmlvaidel |
| | | mqslnhngetlrqkppvgeadpyrvkmklcillhafstrvvtinrvmgylssaggggsggggsggggsggggsgggg |
| | | sggggsggggsggggsggggsQSVLTQPPSVSGAPGQRVTISCSGSRSNIGSNTVKWYQ |
| | | QLPGTAPKLLIYYNDQRPSGVPDRFSGSKSGTSASLAITGLQAEDEADYYCQS |
| | | YDRYTHPALLFGTGTKVTVLggggsggggsggggsQVQLVESGGGVVQPGRSLRLS |
| | | CAASGFTFSSYGMHWVRQAPGKGLEWVAFIRYDGSNKYYADSVKGRFTISRD |
| | | NSKNTLYLQMNSLRAEDTAVYYCKTHGSHDNWGQGTMVTVSSggggsggggsgg |
| | | ggsEVQLVESGGGLVQPGNSLRLSCAASGFTFSKFGMSWVRQAPGKGLEWVSS |
| | | ISGSGRDTLYAESVKGRFTISRDNAKTTLYLQMNSLRPEDTAVYYCTIGGSLSV |
| | | SSQGTLVTVSSHHHHHHEPEA |
| 120 | ACP136 | mdmrvpaqllgllllwlrgarciwelkkdvyvveldwypdapgemvvltcdtpeedgitwtldqssevlgsgktltiqv |
| | Chimeric | kefgdagqytchkggevlshsllllhkkedgiwstdilkdqkepknktflrceaknysgrftcwwlttistdltfsvkssrg |
| | IL-12 | ssdpqgvtcgaatlsaervrgdnkeyeysvecqedsacpaaeeslpievmvdavhklkyenytssffirdiikpdppkn |
| | fusion | lqlkplknsrqvevsweypdtwstphsyfsltfcvqvqgkskrekkdrvftdktsatvicrknasisvraqdryysssws |
| | protein | ewasvpcsggggsggggsggggsrvipvsgparclsqsmllkttddmvktareklkhysctaedidheditrdqtstlkt |
| | | clplelhknesclatretssttrgsclppqktslmmtlclgsiyedlkmyqtefqainaalqnhnhqqiildkgmlvaidel |
| | | mqslnhngetlrqkppvgeadpyrvkmklcillhafstrvvtinrvmgylssaSGGPGPAGMKGLPGSggg |
| | | gsggggsggggsggggsggggsggggsQSVLTQPPSVSGAPGQRVTISCSGSRSNIGSNTVK |
| | | WYQQLPGTAPKLLIYYNDQRPSGVPDRFSGSKSGTSASLAITGLQAEDEADYY |
| | | CQSYDRYTHPALLFGTGTKVTVLggggsggggsggggsQVQLVESGGGVVQPGRSL |
| | | RLSCAASGFTFSSYGMHWVRQAPGKGLEWVAFIRYDGSNKYYADSVKGRFTI |
| | | SRDNSKNTLYLQMNSLRAEDTAVYYCKTHGSHDNWGQGTMVTVSSHHHHH |
| | | HEPEA |
| 121 | ACP138 | mdmrvpaqllgllllwlrgarciwelkkdvyvveldwypdapgemvvltcdtpeedgitwtldqssevlgsgktltiqv |
| | Chimeric | kefgdagqytchkggevlshsllllhkkedgiwstdilkdqkepknktflrceaknysgrftcwwlttistdltfsvkssrg |
| | IL-12 | ssdpqgvtcgaatlsaervrgdnkeyeysvecqedsacpaaeeslpievmvdavhklkyenytssffirdiikpdppkn |
| | fusion | lqlkplknsrqvevsweypdtwstphsyfsltfcvqvqgkskrekkdrvftdktsatvicrknasisvraqdryysssws |
| | protein | ewasvpcsggggsggggsggggsrvipvsgparclsqsmllkttddmvktareklkhysctaedidheditrdqtstlkt |
| | | clplelhknesclatretssttrgsclppqktslmmtlclgsiyedlkmyqtefqainaalqnhnhqqiildkgmlvaidel |
| | | mqslnhngetlrqkppvgeadpyrvkmklcillhafstrvvtinrvmgylssaSGGPGPAGMKGLPGSggg |
| | | gsggggsggggsggggsggggsggggsQSVLTQPPSVSGAPGQRVTISCSGSRSNIGSNTVK |
| | | WYQQLPGTAPKLLIYYNDQRPSGVPDRFSGSKSGTSASLAITGLQAEDEADYY |
| | | CQSYDRYTHPALLFGTGTKVTVLggggsggggsggggsQVQLVESGGGVVQPGRSL |
| | | RLSCAASGFTFSSYGMHWVRQAPGKGLEWVAFIRYDGSNKYYADSVKGRFTI |
| | | SRDNSKNTLYLQMNSLRAEDTAVYYCKTHGSHDNWGQGTMVTVSSggggsggg |
| | | gsggggsEVQLVESGGGLVQPGNSLRLSCAASGFTFSKFGMSWVRQAPGKGLEW |
| | | VSSISGSGRDTLYAESVKGRFTISRDNAKTTLYLQMNSLRPEDTAVYYCTIGGS |
| | | LSVSSQGTLVTVSSggggsggggsggggsQVQLQESGGGLAQAGGSLSLSCAASGFT |
| | | VSNSVMAWYRQTPGKQREFVAIINSVGSTNYADSVKGRFTISRDNAKNTVYL |
| | | QMNNLKPEDTAVYVCNRNFDRIYWGQGTQVTVSSHHHHHHEPEA |
| 122 | ACP139 | mdmrvpaqllgllllwlrgarcQVQLQESGGGLAQAGGSLSLSCAASGFTVSNSVMAWY |
| | Chimeric | RQTPGKQREFVAIINSVGSTNYADSVKGRFTISRDNAKNTVYLQMNNLKPEDT |
| | IL-12 | AVYVCNRNFDRIYWGQGTQVTVSSggggsggggsggggsiwelkkdvyvveldwypdapgem |
| | fusion | vvltcdtpeedgitwtldqssevlgsgktltiqvkefgdagqytchkggevlshsllllhkkedgiwstdilkdqkepknk |
| | protein | tflrceaknysgrftcwwlttistdltfsvkssrgssdpqgvtcgaatlsaervrgdnkeyeysvecqedsacpaaeeslpie |
| | | vmvdavhklkyenytssffirdiikpdppknlqlkplknsrqvevsweypdtwstphsyfsltfcvqvqgkskrekkd |
| | | rvftdktsatvicrknasisvraqdryyssswsewasvpcsggggsggggsggggsrvipvsgparclsqsrnllkttdd |
| | | mvktareklkhysctaedidheditrdqtstlktclplelhknesclatretssttrgsclppqktslmmtlclgsiyedlkm |
| | | yqtefqainaalqnhnhqqiildkgmlvaidelmqslnhngetlrqkppvgeadpyrvkmklcillhafstrvvtinrv |
| | | mgylssaSGGPGPAGMKGLPGSggggsggggsggggsggggsggggsggggsQSVLTQPPSVS |
| | | GAPGQRVTISCSGSRSNIGSNTVKWYQQLPGTAPKLLIYYNDQRPSGVPDRFS |
| | | GSKSGTSASLAITGLQAEDEADYYCQSYDRYTHPALLFGTGTKVTVLggggsggg |
| | | gsggggsQVQLVESGGGVVQPGRSLRLSCAASGFTFSSYGMHWVRQAPGKGLE |
| | | WVAFIRYDGSNKYYADSVKGRFTISRDNSKNTLYLQMNSLRAEDTAVYYCKT |
| | | HGSHDNWGQGTMVTVSSggggsggggsggggsEVQLVESGGGLVQPGNSLRLSCA |
| | | ASGFTFSKFGMSWVRQAPGKGLEWVSSISGSGRDTLYAESVKGRFTISRDNAK |
| | | TTLYLQMNSLRPEDTAVYYCTIGGSLSVSSQGTLVTVSSHHHHHHEPEA |
| 123 | ACP140 | mdmrvpaqllgllllwlrgarcQVQLQESGGGLAQAGGSLSLSCAASGFTVSNSVMAWY |
| | Chimeric | RQTPGKQREFVAIINSVGSTNYADSVKGRFTISRDNAKNTVYLQMNNLKPEDT |
| | IL-12 | AVYVCNRNFDRIYWGQGTQVTVSSSGGPGPAGMKGLPGSiwelkkdvyvveldwyp |
| | fusion | dapgemvvltcdtpeedgitwtldqssevlgsgktltiqvkefgdagqytchkggevishsllllhkkedgiwstdilkdq |
| | protein | kepknktflrceaknysgrftcwwlttistdltfsvkssrgssdpqgvtcgaatlsaervrgdnkeyeysvecqedsacpa |
| | | aeeslpievmvdavhklkyenytssffirdiikpdppknlqlkplknsrqvevsweypdtwstphsyfsltfcvqvqgk |
| | | skrekkdrvftdktsatvicrknasisvraqdryyssswsewasvpcsggggsggggsggggsrvipvsgparclsqsr |
| | | nllkttddmvktareklkhysctaedidheditrdqtstlktclplelhknesclatretssttrgsclppqktslmmtlclgsi |
| | | yedlkmyqtefqainaalqnhnhqqiildkgmlvaidelmqslnhngetlrqkppvgeadpyrvkmklcillhafstrv |
| | | vtinrvmgylssaSGGPGPAGMKGLPGSggggsggggsggggsggggsggggsggggsQSVLTQP |
| | | PSVSGAPGQRVTISCSGSRSNIGSNTVKWYQQLPGTAPKLLIYYNDQRPSGVPD |
| | | RFSGSKSGTSASLAITGLQAEDEADYYCQSYDRYTHPALLFGTGTKVTVLgggg |
| | | sggggsggggsQVQLVESGGGVVQPGRSLRLSCAASGFTFSSYGMHWVRQAPGKG |
| | | LEWVAFIRYDGSNKYYADSVKGRFTISRDNSKNTLYLQMNSLRAEDTAVYYC |
| | | KTHGSHDNWGQGTMVTVSSggggsggggsggggsEVQLVESGGGLVQPGNSLRLSC |
| | | AASGFTFSKFGMSWVRQAPGKGLEWVSSISGSGRDTLYAESVKGRFTISRDNA |
| | | KTTLYLQMNSLRPEDTAVYYCTIGGSLSVSSQGTLVTVSSHHHHHHEPEA |
| 124 | ACP38 | mdmrvpaqllgllllwlrgarcaptssstkktqlqlehllldlqmilnginnyknpkltrmltfkfympkkatelkhlqcle |
| | IL-2 | eelkpleevlnlaqsknfhlrprdlisninvivlelkgsettfmceyadetativeflnrwitfcqsiistltSGGPGPAG |
| | fusion | MKGLPGSEVQLVESGGGLVQPGGSLRLSCAASGFTFSSYTLAWVRQAPGKGL |
| | protein | EWVAAIDSSSYTYSPDTVRGRFTISRDNAKNSLYLQMNSLRAEDTAVYYCAR |
| | | DSNWDALDYWGQGTTVTVSSGGGGSGGGGSGGGGSDIQMTQSPSSLSASVG |
| | | DRVTITCKASQNVGTNVGWYQQKPGKAPKALIYSASFRYSGVPSRFSGSGSGT |
| | | DFTLTISSLQPEDFATYYCQQYYTYPYTFGGGTKVEIKggggsggggsggggsEVQLV |
| | | ESGGGLVQPGNSLRLSCAASGFTFSKFGMSWVRQAPGKGLEWVSSISGSGRDT |
| | | LYAESVKGRFTISRDNAKTTLYLQMNSLRPEDTAVYYCTIGGSLSVSSQGTLV |
| | | TVSSggggsggggsggggsQVQLQESGGGLVQAGGSLRLSCAASGRIFSIDIMSWYR |
| | | QAPGKQRELVARITRGGTISYDDSVKGRFTISRDNAKNTVYLQMNSLKPEDTG |
| | | VYYCNALYGTDYWGKGTQVTVSSHHHHHH |
| 125 | ACP39 | mdmrvpaqllgllllwlrgarcQVQLQESGGGLVQAGGSLRLSCAASGRIFSIDIMSWYR |
| | IL-2 | QAPGKQRELVARITRGGTISYDDSVKGRFTISRDNAKNTVYLQMNSLKPEDTG |
| | fusion | VYYCNALYGTDYWGKGTQVTVSSSGGPGPAGMKGLPGSEVQLVESGGGLVQ |
| | protein | PGNSLRLSCAASGFTFSKFGMSWVRQAPGKGLEWVSSISGSGRDTLYAESVKG |
| | | RFTISRDNAKTTLYLQMNSLRPEDTAVYYCTIGGSLSVSSQGTLVTVSSSGGPG |
| | | PAGMKGLPGSEVQLVESGGGLVQPGGSLRLSCAASGFTFSSYTLAWVRQAPG |
| | | KGLEWVAAIDSSSYTYSPDTVRGRFTISRDNAKNSLYLQMNSLRAEDTAVYY |
| | | CARDSNWDALDYWGQGTTVTVSSGGGGSGGGGSGGGGSDIQMTQSPSSLSA |
| | | SVGDRVTITCKASQNVGTNVGWYQQKPGKAPKALIYSASFRYSGVPSRFSGSG |
| | | SGTDFTLTISSLQPEDFATYYCQQYYTYPYTFGGGTKVEIKSGGPGPAGMKGL |
| | | PGSaptssstkktqlqlehllldlqmilnginnyknpkltrmltfkfympkkatelkhlqcleeelkpleevlnlaqsknf |
| | | hlrprdlisninvivlelkgsettfmceyadetativeflnrwitfcqsiistltHHHHHH** |
| 126 | ACP40 | mdmrvpaqllgllllwlrgarcelcdddppeiphatfkamaykegtmlnceckrgfrriksgslymlctgnsshsswd |
| | IL-2 | nqcqctssatrnttkqvtpqpeeqkerkttemqspmqpvdqaslpghcrepppweneateriyhfvvgqmvyyqcv |
| | fusion | qgyralhrgpaesvckmthgktrwtqpqlictgemetsqfpgeekpqaspegrpesetsclvtttdfqiqtemaatmets |
| | protein | iftteyqggggsggggsggggsggggsggggsggggsSGGPGPAGMKGLPGSaptssstkktqlqlehllld |
| | | lqmilnginnyknpkltrmltfkfympkkatelkhlqcleeelkpleevlnlaqsknfhlrprdlisninvivlelkgsettf |
| | | mceyadetativeflnrwitfcqsiistltHHHHHH |
| 127 | ACP41 | mdmrvpaqllgllllwlrgarcaptssstkktqlqlehllldlqmilnginnyknpkltrmltfkfympkkatelkhlqcle |
| | IL-2 | eelkpleevlnlaqsknfhlrprdlisninvivlelkgsettfmceyadetativeflnrwitfcqsiistltSGGPGPAG |
| | fusion | MKGLPGSggggsggggsggggsggggsggggsggggselcdddppeiphatfkamaykegtmlnceckrgfr |
| | protein | riksgslymlctgnsshsswdnqcqctssatrnttkqvtpqpeeqkerkttemqspmqpvdqaslpghcrepppwen |
| | (WW0076) | eateriyhfvvgqmvyyqcvqgyralhrgpaesvckmthgktrwtqpqlictgemetsqfpgeekpqaspegrpese |
| | | tsclvtttdfqiqtemaatmetsiftteyqHHHHHH |
| 128 | ACP42 | mdmrvpaqllgllllwlrgarcEVQLVESGGGLVQPGNSLRLSCAASGFTFSKFGMSWVR |
| | IL-2 | QAPGKGLEWVSSISGSGRDTLYAESVKGRFTISRDNAKTTLYLQMNSLRPEDT |
| | fusion | AVYYCTIGGSLSVSSQGTLVTVSSggggsggggsggggselcdddppeiphatfkamaykegtmln |
| | protein | ceckrgfrriksgslymlctgnsshsswdnqcqctssatrnttkqvtpqpeeqkerkttemqspmqpvdqaslpghcre |
| | (WW0078) | pppweneateriyhfvvgqmvyyqcvqgyralhrgpaesvckmthgktrwtqpqlictgemetsqfpgeekpqasp |
| | | egrpesetsclvtttdfqiqtemaatmetsiftteyqggggsggggsggggsggggsggggsggggsSGGPGPAG |
| | | MKGLPGSaptssstkktqlqlehllldlqmilnginnyknpkltrmltfkfympkkatelkhlqcleeelkpleevlnl |
| | | aqsknfhlrprdlisninvivlelkgsettfmceyadetativeflnrwitfcqsiistltHHHHHH |
| 129 | ACP43 | mdmrvpaqllgllllwlrgarcaptssstkktqlqlehllldlqmilnginnyknpkltrmltfkfympkkatelkhlqcle |
| | IL-2 | eelkpleevlnlaqsknfhlrprdlisninvivlelkgsettfmceyadetativeflnrwitfcqsiistltSGGPGPAG |
| | fusion | MKGLPGSggggsggggsggggsggggsggggsggggselcdddppeiphatfkamaykegtmlnceckrgfr |
| | protein | riksgslymlctgnsshsswdnqcqctssatrnttkqvtpqpeeqkerkttemqspmqpvdqaslpghcrepppwen |
| | (WW0079) | eateriyhfvvgqmvyyqcvqgyralhrgpaesvckmthgktrwtqpqlictgemetsqfpgeekpqaspegrpese |
| | | tsclvtttdfqiqtemaatmetsiftteyqggggsggggsggggsEVQLVESGGGLVQPGNSLRLSCA |
| | | ASGFTFSKFGMSWVRQAPGKGLEWVSSISGSGRDTLYAESVKGRFTISRDNAK |
| | | TTLYLQMNSLRPEDTAVYYCTIGGSLSVSSQGTLVTVSSHHHHHH |
| 130 | ACP44 | mdmrvpaqllgllllwlrgarcaptssstkktqlqlehllldlqmilnginnyknpkltrmltfkfympkkatelkhlqcle |
| | IL-2 | eelkpleevlnlaqsknfhlrprdlisninvivlelkgsettfmceyadetativeflnrwitfcqsiistltSGGPGPAG |
| | fusion | MKGLPGSggggsggggsggggsggggsggggsggggselcdddppeiphatfkamaykegtmlnceckrgfr |
| | protein | riksgslymlctgnsshsswdnqcqctssatrnttkqvtpqpeeqkerkttemqspmqpvdqaslpghcrepppwen |
| | (WW0080) | eateriyhfvvgqmvyyqcvqgyralhrgpaesvckmthgktrwtqpqlictgemetsqfpgeekpqaspegrpese |
| | | tsclvtttdfqiqtemaatmetsiftteyqSGGPGPAGMKGLPGSEVQLVESGGGLVQPGNSLR |
| | | LSCAASGFTFSKFGMSWVRQAPGKGLEWVSSISGSGRDTLYAESVKGRFTISR |
| | | DNAKTTLYLQMNSLRPEDTAVYYCTIGGSLSVSSQGTLVTVSSHHHHHH |
| 131 | ACP45 | mdmrvpaqllgllllwlrgarcEVQLVESGGGLVQPGNSLRLSCAASGFTFSKFGMSWVR |
| | IL-2 | QAPGKGLEWVSSISGSGRDTLYAESVKGRFTISRDNAKTTLYLQMNSLRPEDT |
| | fusion | AVYYCTIGGSLSVSSQGTLVTVSSSGGPGPAGMKGLPGSEVQLVESGGGLVQP |
| | protein | GGSLRLSCAASGFTFSSYTLAWVRQAPGKGLEWVAAIDSSSYTYSPDTVRGRF |
| | WW0046 | TISRDNAKNSLYLQMNSLRAEDTAVYYCARDSNWDALDYWGQGTTVTVSSG |
| | | GGGSGGGGSGGGGSDIQMTQSPSSLSASVGDRVTITCKASQNVGTNVGWYQQ |
| | | KPGKAPKALIYSASFRYSGVPSRFSGSGSGTDFTLTISSLQPEDFATYYCQQYY |
| | | TYPYTFGGGTKVEIKggggsggggsggggsggggsggggsggggsSGGPGPAGMKGLPGSa |
| | | ptssstkktqlqlehllldlqmilnginnyknpkltrmltfkfympkkatelkhlqcleeelkpleevlnlaqsknfhlrprd |
| | | lisninvivlelkgsettfmceyadetativeflnrwitfcqsiistltHHHHHH |
| 132 | ACP46 | mdmrvpaqllgllllwlrgarcaptssstkktqlqlehllldlqmilnginnyknpkltrmltfkfympkkatelkhlqcle |
| | IL-2 | eelkpleevlnlaqsknfhlrprdlisninvivlelkgsettfmceyadetativeflnrwitfcqsiistltSGGPGPAG |
| | fusion | MKGLPGSggggsggggsggggsggggsggggsggggsEVQLVESGGGLVQPGGSLRLSCA |
| | protein | ASGFTFSSYTLAWVRQAPGKGLEWVAAIDSSSYTYSPDTVRGRFTISRDNAKN |
| | | SLYLQMNSLRAEDTAVYYCARDSNWDALDYWGQGTTVTVSSsggpgpagmkglp |
| | | gsDIQMTQSPSSLSASVGDRVTITCKASQNVGTNVGWYQQKPGKAPKALIYSA |
| | | SFRYSGVPSRFSGSGSGTDFTLTISSLQPEDFATYYCQQYYTYPYTFGGGTKVEI |
| | | KggggsggggsggggsEVQLVESGGGLVQPGNSLRLSCAASGFTFSKFGMSWVRQA |
| | | PGKGLEWVSSISGSGRDTLYAESVKGRFTISRDNAKTTLYLQMNSLRPEDTAV |
| | | YYCTIGGSLSVSSQGTLVTVSSggggsggggsggggsQVQLQESGGGLVQAGGSLRL |
| | | SCAASGRIFSIDIMSWYRQAPGKQRELVARITRGGTISYDDSVKGRFTISRDNA |
| | | KNTVYLQMNSLKPEDTGVYYCNALYGTDYWGKGTQVTVSSHHHHHH |
| 133 | ACP47 | mdmrvpaqllgllllwlrgarcQVQLQESGGGLVQAGGSLRLSCAASGRIFSIDIMSWYR |
| | IL-2 | QAPGKQRELVARITRGGTISYDDSVKGRFTISRDNAKNTVYLQMNSLKPEDTG |
| | fusion | VYYCNALYGTDYWGKGTQVTVSSggggsggggsggggsaptssstkktqlqlehllldlqmilngin |
| | protein | nyknpkitrmltfkfympkkatelkhlqcleeelkpleevlnlaqsknfhlrprdlisninvivlelkgsettfmceyadet |
| | | ativeflnrwitfcqsiistltSGGPGPAGMKGLPGSEVQLVESGGGLVQPGNSLRLSCAAS |
| | | GFTFSKFGMSWVRQAPGKGLEWVSSISGSGRDTLYAESVKGRFTISRDNAKTT |
| | | LYLQMNSLRPEDTAVYYCTIGGSLSVSSQGTLVTVSSggggsggggsggggsggggsgg |
| | | ggsggggsEVQLVESGGGLVQPGGSLRLSCAASGFTFSSYTLAWVRQAPGKGLE |
| | | WVAAIDSSSYTYSPDTVRGRFTISRDNAKNSLYLQMNSLRAEDTAVYYCARD |
| | | SNWDALDYWGQGTTVTVSSGGGGSGGGGSGGGGSDIQMTQSPSSLSASVGD |
| | | RVTITCKASQNVGTNVGWYQQKPGKAPKALIYSASFRYSGVPSRFSGSGSGTD |
| | | FTLTISSLQPEDFATYYCQQYYTYPYTFGGGTKVEIKHHHHHH |
| 134 | ACP48 | mdmrvpaqllgllllwlrgarcaptssstkktqlqlehllldlqmilnginnyknpkltrmltfkfympkkatelkhlqcle |
| | IL-2 | eelkpleevlnlaqsknfhlrprdlisninvivlelkgsettfmceyadetativeflnrwitfcqsiistltSGGPGPAG |
| | fusion | MKGLPGSEVQLVESGGGLVQPGGSLRLSCAASGFTFSSYTLAWVRQAPGKGL |
| | protein | EWVAAIDSSSYTYSPDTVRGRFTISRDNAKNSLYLQMNSLRAEDTAVYYCAR |
| | (WW0054) | DSNWDALDYWGQGTTVTVSSGGGGSGGGGSGGGGSDIQMTQSPSSLSASVG |
| | | DRVTITCKASQNVGTNVGWYQQKPGKAPKALIYSASFRYSGVPSRFSGSGSGT |
| | | DFTLTISSLQPEDFATYYCQQYYTYPYTFGGGTKVEIKggggsggggsggggsEVQLV |
| | | ESGGGLVQPGNSLRLSCAASGFTFSKFGMSWVRQAPGKGLEWVSSISGSGRDT |
| | | LYAESVKGRFTISRDNAKTTLYLQMNSLRPEDTAVYYCTIGGSLSVSSQGTLV |
| | | TVSSHHHHHH |
| 135 | ACP49 | mdmrvpaqllgllllwlrgarcaptssstkktqlqlehllldlqmilnginnyknpkltrmltfkfympkkatelkhlqcle |
| | IL-2 | eelkpleevlnlaqsknfhlrprdlisninvivlelkgsettfmceyadetativeflnrwitfcqsiistltSGGPGPAG |
| | fusion | MKGLPGSggggsggggsggggsggggsggggsggggsEVQLVESGGGLVQPGGSLRLSCA |
| | protein | ASGFTFSSYTLAWVRQAPGKGLEWVAAIDSSSYTYSPDTVRGRFTISRDNAKN |
| | (WW0055) | SLYLQMNSLRAEDTAVYYCARDSNWDALDYWGQGTTVTVSSGGGGSGGGG |
| | | SGGGGSDIQMTQSPSSLSASVGDRVTITCKASQNVGTNVGWYQQKPGKAPKA |
| | | LIYSASFRYSGVPSRFSGSGSGTDFTLTISSLQPEDFATYYCQQYYTYPYTFGGG |
| | | TKVEIKggggsggggsggggsEVQLVESGGGLVQPGNSLRLSCAASGFTFSKFGMSW |
| | | VRQAPGKGLEWVSSISGSGRDTLYAESVKGRFTISRDNAKTTLYLQMNSLRPE |
| | | DTAVYYCTIGGSLSVSSQGTLVTVSSHHHHHH |
| 136 | ACP92 | mdmrvpaqllgllllwlrgarcEVQLVESGGGLVQPGNSLRLSCAASGFTFSKFGMSWVR |
| | IL-2 | QAPGKGLEWVSSISGSGRDTLYAESVKGRFTISRDNAKTTLYLQMNSLRPEDT |
| | fusion | AVYYCTIGGSLSVSSQGTLVTVSSSGGPGPAGMKGLPGSaptssstkktqlqlehllldlqm |
| | protein | ilnginnyknpkltrmltfkfympkkatelkhlqcleeelkpleevlnlaqsknfhlrprdlisninvivlelkgsettfmce |
| | | yadetativeflnrwitfcqsiistltSGGPGPAGMKGLPGSEVQLVESGGGLVQPGNSLRLSC |
| | | AASGFTFSKFGMSWVRQAPGKGLEWVSSISGSGRDTLYAESVKGRFTISRDNA |
| | | KTTLYLQMNSLRPEDTAVYYCTIGGSLSVSSQGTLVTVSSHHHHHH |
| 137 | ACP93 | mdmrvpaqllgllllwlrgarcQVQLQESGGGLVQAGGSLRLSCAASGRIFSIDIMSWYR |
| | IL-2 | QAPGKQRELVARITRGGTISYDDSVKGRFTISRDNAKNTVYLQMNSLKPEDTG |
| | fusion | VYYCNALYGTDYWGKGTQVTVSSgsgsgsgsgsgsgsgsEVQLVESGGGLVQPGNS |
| | protein | LRLSCAASGFTFSKFGMSWVRQAPGKGLEWVSSISGSGRDTLYAESVKGRFTI |
| | | SRDNAKTTLYLQMNSLRPEDTAVYYCTIGGSLSVSSQGTLVTVSSgsgsgsgsgsgs |
| | | gsgsQVQLQESGGGLVQAGGSLRLSCAASGRIFSIDIMSWYRQAPGKQRELVAR |
| | | ITRGGTISYDDSVKGRFTISRDNAKNTVYLQMNSLKPEDTGVYYCNALYGTD |
| | | YWGKGTQVTVSSgsgsgsgsgsgsgsgsEVQLVESGGGLVQPGGSLRLSCAASGFTFS |
| | | SYTLAWVRQAPGKGLEWVAAIDSSSYTYSPDTVRGRFTISRDNAKNSLYLQM |
| | | NSLRAEDTAVYYCARDSNWDALDYWGQGTTVTVSSGGGGSGGGGSGGGGS |
| | | DIQMTQSPSSLSASVGDRVTITCKASQNVGTNVGWYQQKPGKAPKALIYSASF |
| | | RYSGVPSRFSGSGSGTDFTLTISSLQPEDFATYYCQQYYTYPYTFGGGTKVEIK |
| | | SGGPGPAGMKGLPGSaptssstkktqlqlehllldlqmilnginnyknpkltrmltfkfympkkatelkhlqcl |
| | | eeelkpleevlnlaqsknfhlrprdlisninvivlelkgsettfmceyadetativeflnrwitfcqsiistltHHHHHH |
| 138 | ACP94 | mdmrvpaqllgllllwlrgarcQVQLQESGGGLVQAGGSLRLSCAASGRIFSIDIMSWYR |
| | IL-2 | QAPGKQRELVARITRGGTISYDDSVKGRFTISRDNAKNTVYLQMNSLKPEDTG |
| | fusion | VYYCNALYGTDYWGKGTQVTVSSgsgsgsgsgsgsgsgsEVQLVESGGGLVQPGNS |
| | protein | LRLSCAASGFTFSKFGMSWVRQAPGKGLEWVSSISGSGRDTLYAESVKGRFTI |
| | | SRDNAKTTLYLQMNSLRPEDTAVYYCTIGGSLSVSSQGTLVTVSSgsgsgsgsgsgs |
| | | gsgsEVQLVESGGGLVQPGGSLRLSCAASGFTFSSYTLAWVRQAPGKGLEWVA |
| | | AIDSSSYTYSPDTVRGRFTISRDNAKNSLYLQMNSLRAEDTAVYYCARDSNW |
| | | DALDYWGQGTTVTVSSGGGGSGGGGSGGGGSDIQMTQSPSSLSASVGDRVTI |
| | | TCKASQNVGTNVGWYQQKPGKAPKALIYSASFRYSGVPSRFSGSGSGTDFTLT |
| | | ISSLQPEDFATYYCQQYYTYPYTFGGGTKVEIKSGGPGPAGMKGLPGSaptssstk |
| | | ktqlqlehllldlqmilnginnyknpkltrmltfkfympkkatelkhlqcleeelkpleevlnlaqsknfhlrprdlisninv |
| | | ivlelkgsettfmceyadetativeflnrwitfcqsiistltHHHHHH |
| 139 | ACP95 | mdmrvpaqllgllllwlrgarcQVQLQESGGGLVQAGGSLRLSCAASGRIFSIDIMSWYR |
| | IL-2 | QAPGKQRELVARITRGGTISYDDSVKGRFTISRDNAKNTVYLQMNSLKPEDTG |
| | fusion | VYYCNALYGTDYWGKGTQVTVSSgsgsgsgsgsgsgsgsEVQLVESGGGLVQPGNS |
| | protein | LRLSCAASGFTFSKFGMSWVRQAPGKGLEWVSSISGSGRDTLYAESVKGRFTI |
| | | SRDNAKTTLYLQMNSLRPEDTAVYYCTIGGSLSVSSQGTLVTVSSSGGPGPAG |
| | | MKGLPGSaptssstkktqlqlehllldlqmilnginnyknpkltrmltfkfympkkatelkhlqcleeelkpleevlnl |
| | | aqsknfhlrprdlisninvivlelkgsettfmceyadetativeflnrwitfcqsiistltHHHHHH |
| 140 | ACP96 | mdmrvpaqllgllllwlrgarcQVQLQESGGGLVQAGGSLRLSCAASGRIFSIDIMSWYR |
| | IL-2 | QAPGKQRELVARITRGGTISYDDSVKGRFTISRDNAKNTVYLQMNSLKPEDTG |
| | fusion | VYYCNALYGTDYWGKGTQVTVSSSGGPGPAGMKGLPGSaptssstkktqlqlehllldlq |
| | protein | milnginnyknpkltrmltfkfympkkatelkhlqcleeelkpleevlnlaqsknfhlrprdlisninvivlelkgsettfm |
| | | ceyadetativeflnrwitfcqsiistltSGGPGPAGMKGLPGSEVQLVESGGGLVQPGNSLRL |
| | | SCAASGFTFSKFGMSWVRQAPGKGLEWVSSISGSGRDTLYAESVKGRFTISRD |
| | | NAKTTLYLQMNSLRPEDTAVYYCTIGGSLSVSSQGTLVTVSSHHHHHH |
| 141 | ACP97 | mdmrvpaqllgllllwlrgarcQVQLQESGGGLVQAGGSLRLSCAASGRIFSIDIMSWYR |
| | IL-2 | QAPGKQRELVARITRGGTISYDDSVKGRFTISRDNAKNTVYLQMNSLKPEDTG |
| | fusion | VYYCNALYGTDYWGKGTQVTVSSggggsggggsggggsEVQLVESGGGLVQPGNS |
| | protein | LRLSCAASGFTFSKFGMSWVRQAPGKGLEWVSSISGSGRDTLYAESVKGRFTI |
| | | SRDNAKTTLYLQMNSLRPEDTAVYYCTIGGSLSVSSQGTLVTVSSSGGPGPAG |
| | | MKGLPGSaptssstkktqlqlehllldlqmilnginnyknpkltrmltfkfympkkatelkhlqcleeelkpleevlnl |
| | | aqsknfhlrprdlisninvivlelkgsettfmceyadetativeflnrwitfcqsiistltSGGPGPAGMKGLPGS |
| | | EVQLVESGGGLVQPGNSLRLSCAASGFTFSKFGMSWVRQAPGKGLEWVSSIS |
| | | GSGRDTLYAESVKGRFTISRDNAKTTLYLQMNSLRPEDTAVYYCTIGGSLSVS |
| | | SQGTLVTVSSHHHHHH |
| 142 | ACP99 | mdmrvpaqllgllllwlrgarcQVQLQESGGGLVQAGGSLRLSCAASGRIFSIDIMSWYR |
| | IL-2 | QAPGKQRELVARITRGGTISYDDSVKGRFTISRDNAKNTVYLQMNSLKPEDTG |
| | fusion | VYYCNALYGTDYWGKGTQVTVSSggggsggggsggggsaptssstkktqlqlehllldlqmilngin |
| | protein | nyknpkltrmltfkfympkkatelkhlqcleeelkpleevlnlaqsknfhlrprdlisninvivlelkgsettfmceyadet |
| | | ativeflnrwitfcqsiistltSGGPGPAGMKGLPGSEVQLVESGGGLVQPGNSLRLSCAAS |
| | | GFTFSKFGMSWVRQAPGKGLEWVSSISGSGRDTLYAESVKGRFTISRDNAKTT |
| | | LYLQMNSLRPEDTAVYYCTIGGSLSVSSQGTLVTVSSHHHHHH |
| 143 | ACP100 | mdmrvpaqllgllllwlrgarcQVQLQESGGGLVQAGGSLRLSCAASGRIFSIDIMSWYR |
| | IL-2 | QAPGKQRELVARITRGGTISYDDSVKGRFTISRDNAKNTVYLQMNSLKPEDTG |
| | fusion | VYYCNALYGTDYWGKGTQVTVSSggggsggggsggggsaptssstkktqlqlehllldlqmilngin |
| | protein | nyknpkltrmltfkfympkkatelkhlqcleeelkpleevlnlaqsknfhlrprdlisninvivlelkgsettfmceyadet |
| | | ativeflnrwitfcqsiistltHHHHHH |
| 144 | ACP101 | mdmrvpaqllgllllwlrgarcaptssstkktqlqlehllldlqmilnginnyknpkltrmltfkfympkkatelkhlqcle |
| | (WW0061) | eelkpleevlnlaqsknfhlrprdlisninvivlelkgsettfmceyadetativeflnrwitfcqsiistltSGGPGPAG |
| | IL-2 | MKGLPGSEVQLVESGGGLVQPGNSLRLSCAASGFTFSKFGMSWVRQAPGKGL |
| | fusion | EWVSSISGSGRDTLYAESVKGRFTISRDNAKTTLYLQMNSLRPEDTAVYYCTI |
| | protein | GGSLSVSSQGTLVTVSSHHHHHH |
| 145 | ACP102 | mdmrvpaqllgllllwlrgarcQVQLQESGGGLVQAGGSLRLSCAASGRIFSIDIMSWYR |
| | IL-2 | QAPGKQRELVARITRGGTISYDDSVKGRFTISRDNAKNTVYLQMNSLKPEDTG |
| | fusion | VYYCNALYGTDYWGKGTQVTVSSSGGPGPAGMKGLPGSaptssstkktqlqlehllldlq |
| | protein | milnginnyknpkltrmltfkfympkkatelkhlqcleeelkpleevlnlaqsknfhlrprdlisninvivlelkgsettfm |
| | | ceyadetativeflnrwitfcqsiistltSGGPGPAGMKGLPGSEVQLVESGGGLVQPGNSLRL |
| | | SCAASGFTFSKFGMSWVRQAPGKGLEWVSSISGSGRDTLYAESVKGRFTISRD |
| | | NAKTTLYLQMNSLRPEDTAVYYCTIGGSLSVSSQGTLVTVSSggggsggggsggggs |
| | | ggggsggggsggggsEVQLVESGGGLVQPGGSLRLSCAASGFTFSSYTLAWVRQAPG |
| | | KGLEWVAAIDSSSYTYSPDTVRGRFTISRDNAKNSLYLQMNSLRAEDTAVYY |
| | | CARDSNWDALDYWGQGTTVTVSSGGGGSGGGGSGGGGSDIQMTQSPSSLSA |
| | | SVGDRVTITCKASQNVGTNVGWYQQKPGKAPKALIYSASFRYSGVPSRFSGSG |
| | | SGTDFTLTISSLQPEDFATYYCQQYYTYPYTFGGGTKVEIKHHHHHH |
| 146 | ACP103 | mdmrvpaqllgllllwlrgarcaptssstkktqlqlehllldlqmilnginnyknpkltrmltfkfympkkatelkhlqcle |
| | IL-2 | eelkpleevlnlaqsknfhlrprdlisninvivlelkgsettfmceyadetativeflnrwitfcqsiistltSGGPGPAG |
| | fusion | MKGLPGSggggsggggsggggsggggsggggsggggsEVQLVESGGGLVQPGGSLRLSCA |
| | protein | ASGFTFSSYTLAWVRQAPGKGLEWVAAIDSSSYTYSPDTVRGRFTISRDNAKN |
| | | SLYLQMNSLRAEDTAVYYCARDSNWDALDYWGQGTTVTVSSGGGGSGGGG |
| | | SGGGGSDIQMTQSPSSLSASVGDRVTITCKASQNVGTNVGWYQQKPGKAPKA |
| | | LIYSASFRYSGVPSRFSGSGSGTDFTLTISSLQPEDFATYYCQQYYTYPYTFGGG |
| | | TKVEIKggggsggggsggggsEVQLVESGGGLVQPGNSLRLSCAASGFTFSKFGMSW |
| | | VRQAPGKGLEWVSSISGSGRDTLYAESVKGRFTISRDNAKTTLYLQMNSLRPE |
| | | DTAVYYCTIGGSLSVSSQGTLVTVSSggggsggggsggggsQVQLQESGGGLAQAGG |
| | | SLSLSCAASGFTVSNSVMAWYRQTPGKQREFVAIINSVGSTNYADSVKGRFTIS |
| | | RDNAKNTVYLQMNNLKPEDTAVYVCNRNFDRIYWGQGTQVTVSSHHHHHH |
| 147 | ACP104 | mdmrvpaqllgllllwlrgarcQVQLQESGGGLAQAGGSLSLSCAASGFTVSNSVMAWY |
| | IL-2 | RQTPGKQREFVAIINSVGSTNYADSVKGRFTISRDNAKNTVYLQMNNLKPEDT |
| | fusion | AVYVCNRNFDRIYWGQGTQVTVSSaptssstkktqlqlehllldlqmilnginnyknpkltrmltfkfy |
| | protein | mpkkatelkhlqcleeelkpleevlnlaqsknfhlrprdlisninvivlelkgsettfmceyadetativeflnrwitfcqsii |
| | | stltSGGPGPAGMKGLPGSEVQLVESGGGLVQPGNSLRLSCAASGFTFSKFGMS |
| | | WVRQAPGKGLEWVSSISGSGRDTLYAESVKGRFTISRDNAKTTLYLQMNSLR |
| | | PEDTAVYYCTIGGSLSVSSQGTLVTVSSggggsggggsggggsggggsggggsggggsEVQL |
| | | VESGGGLVQPGGSLRLSCAASGFTFSSYTLAWVRQAPGKGLEWVAAIDSSSYT |
| | | YSPDTVRGRFTISRDNAKNSLYLQMNSLRAEDTAVYYCARDSNWDALDYWG |
| | | QGTTVTVSSGGGGSGGGGSGGGGSDIQMTQSPSSLSASVGDRVTITCKASQNV |
| | | GTNVGWYQQKPGKAPKALIYSASFRYSGVPSRFSGSGSGTDFTLTISSLQPEDF |
| | | ATYYCQQYYTYPYTFGGGTKVEIKHHHHHH |
| 148 | ACP105 | mdmrvpaqllgllllwlrgarcEVQLVESGGGLVQPGGSLRLSCAASGFTFSSYTLAWVR |
| | IL-2 | QAPGKGLEWVAAIDSSSYTYSPDTVRGRFTISRDNAKNSLYLQMNSLRAEDTA |
| | fusion | VYYCARDSNWDALDYWGQGTTVTVSSGGGGSGGGGSGGGGSDIQMTQSPSS |
| | protein | LSASVGDRVTITCKASQNVGTNVGWYQQKPGKAPKALIYSASFRYSGVPSRFS |
| | | GSGSGTDFTLTISSLQPEDFATYYCQQYYTYPYTFGGGTKVEIKggggsggggsggg |
| | | gsggggsggggsggggsSGGPGPAGMKGLPGSaptssstkktqlqlehllldlqmilnginnyknpkltrml |
| | | tfkfympkkatelkhlqcleeelkpleevlnlaqsknfhlrprdlisninvivlelkgsettfmceyadetativeflnrwitf |
| | | cqsiistltSGGPGPAGMKGLPGSEVQLVESGGGLVQPGNSLRLSCAASGFTFSKFG |
| | | MSWVRQAPGKGLEWVSSISGSGRDTLYAESVKGRFTISRDNAKTTLYLQMNS |
| | | LRPEDTAVYYCTIGGSLSVSSQGTLVTVSSggggsggggsggggsQVQLQESGGGLA |
| | | QAGGSLSLSCAASGFTVSNSVMAWYRQTPGKQREFVAIINSVGSTNYADSVK |
| | | GRFTISRDNAKNTVYLQMNNLKPEDTAVYVCNRNFDRIYWGQGTQVTVSSH |
| | | HHHHH |
| 149 | ACP106 | mdmrvpaqllgllllwlrgarcQVQLQESGGGLAQAGGSLSLSCAASGFTVSNSVMAWY |
| | IL-2 | RQTPGKQREFVAIINSVGSTNYADSVKGRFTISRDNAKNTVYLQMNNLKPEDT |
| | fusion | AVYVCNRNFDRIYWGQGTQVTVSSggggsggggsggggsEVQLVESGGGLVQPGNS |
| | protein | LRLSCAASGFTFSKFGMSWVRQAPGKGLEWVSSISGSGRDTLYAESVKGRFTI |
| | | SRDNAKTTLYLQMNSLRPEDTAVYYCTIGGSLSVSSQGTLVTVSSSGGPGPAG |
| | | MKGLPGSEVQLVESGGGLVQPGGSLRLSCAASGFTFSSYTLAWVRQAPGKGL |
| | | EWVAAIDSSSYTYSPDTVRGRFTISRDNAKNSLYLQMNSLRAEDTAVYYCAR |
| | | DSNWDALDYWGQGTTVTVSSGGGGSGGGGSGGGGSDIQMTQSPSSLSASVG |
| | | DRVTITCKASQNVGTNVGWYQQKPGKAPKALIYSASFRYSGVPSRFSGSGSGT |
| | | DFTLTISSLQPEDFATYYCQQYYTYPYTFGGGTKVEIKggggsggggsggggsggggsgg |
| | | ggsggggsSGGPGPAGMKGLPGSaptssstkktqlqlehllldlqmilnginnyknpkltrmltfkfympkk |
| | | atelkhlqcleeelkpleevlnlaqsknfhlrprdlisninvivlelkgsettfmceyadetativeflnrwitfcqsiistltH |
| | | HHHHH |
| 150 | ACP107 | mdmrvpaqllgllllwlrgarcEVQLVESGGGLVQPGGSLRLSCAASGFTFSSYTLAWVR |
| | IL-2 | QAPGKGLEWVAAIDSSSYTYSPDTVRGRFTISRDNAKNSLYLQMNSLRAEDTA |
| | fusion | VYYCARDSNWDALDYWGQGTTVTVSSGGGGSGGGGSGGGGSDIQMTQSPSS |
| | protein | LSASVGDRVTITCKASQNVGTNVGWYQQKPGKAPKALIYSASFRYSGVPSRFS |
| | | GSGSGTDFTLTISSLQPEDFATYYCQQYYTYPYTFGGGTKVEIKggggsggggsggg |
| | | gsggggsggggsggggsEVQLVESGGGLVQPGNSLRLSCAASGFTFSKFGMSWVRQA |
| | | PGKGLEWVSSISGSGRDTLYAESVKGRFTISRDNAKTTLYLQMNSLRPEDTAV |
| | | YYCTIGGSLSVSSQGTLVTVSSSGGPGPAGMKGLPGSaptssstkktqlqlehllldlqmilng |
| | | innyknpkltrmltfkfympkkatelkhlqcleeelkpleevlnlaqsknfhlrprdlisninvivlelkgsettfmceyad |
| | | etativeflnrwitfcqsiistltggggsggggsggggsQVQLQESGGGLAQAGGSLSLSCAASGFT |
| | | VSNSVMAWYRQTPGKQREFVAIINSVGSTNYADSVKGRFTISRDNAKNTVYL |
| | | QMNNLKPEDTAVYVCNRNFDRIYWGQGTQVTVSSHHHHHH |
| 151 | ACP108 | mdmrvpaqllgllllwlrgarcQVQLQESGGGLVQAGGSLRLSCAASGRIFSIDIMSWYR |
| | IL-2 | QAPGKQRELVARITRGGTISYDDSVKGRFTISRDNAKNTVYLQMNSLKPEDTG |
| | fusion | VYYCNALYGTDYWGKGTQVTVSSggggsggggsggggsaptssstkktqlqlehllldlqmilngin |
| | protein | nyknpkitrmltfkfympkkatelkhlqcleeelkpleevlnlaqsknfhlrprdlisninvivlelkgsettfmceyadet |
| | | ativeflnrwitfcqsiistltSGGPGPAGMKGLPGSrgetgpaaPGSEVQLVESGGGLVQPGNS |
| | | LRLSCAASGFTFSKFGMSWVRQAPGKGLEWVSSISGSGRDTLYAESVKGRFTI |
| | | SRDNAKTTLYLQMNSLRPEDTAVYYCTIGGSLSVSSQGTLVTVSSggggsggggsg |
| | | gggsggggsggggsggggsEVQLVESGGGLVQPGGSLRLSCAASGFTFSSYTLAWVRQ |
| | | APGKGLEWVAAIDSSSYTYSPDTVRGRFTISRDNAKNSLYLQMNSLRAEDTAV |
| | | YYCARDSNWDALDYWGQGTTVTVSSGGGGSGGGGSGGGGSDIQMTQSPSSL |
| | | SASVGDRVTITCKASQNVGTNVGWYQQKPGKAPKALIYSASFRYSGVPSRFSG |
| | | SGSGTDFTLTISSLQPEDFATYYCQQYYTYPYTFGGGTKVEIKHHHHHH |
| 152 | ACP117 | mdmrvpaqllgllllwlrgarcEVQLVESGGGLVQPGGSLRLSCAASGFTFSSYAMSWVR |
| | Anti-FN | QAPGKGLEWVSAISGSGGSTYYADSVKGRFTISRDNSKNTLYLQMNSLRAED |
| | CGS-2 | TAVYYCARGVGAFRPYRKHEWGQGTLVTVSRggggsggggsggggsSSELTQDPAV |
| | scFv | SVALGQTVRITCQGDSLRSYYASWYQQKPGQAPVLVIYGKNNRPSGIPDRFSG |
| | | SSSGNTASLTTTGAQAEDEADYYCNSSPFEHNLVVFGGGTKLTVLHHHHHHE |
| | | PEA |
| 153 | ACP118 | mdmrvpaqllgllllwlrgarcQVQLQQSGAELVRPGTSVKVSCKASGYAFTNYLIEWV |
| | NARA1 | KQRPGQGLEWIGVINPGSGGTNYNEKFKGKATLTADKSSSTAYMQLSSLTSD |
| | Vh/Vl | DSAVYFCARWRGDGYYAYFDVWGAGTTVTVSSggggsggggsggggsDIVLTQSP |
| | non- | ASLAVSLGQRATISCKASQSVDYDGDSYMNWYQQKPGQPPKLLIYAASNLES |
| | cleavable | GIPARFSGSGSGTDFTLNIHPVEEEDAATYYCQQSNEDPYTFGGGTKLEIKHHH |
| | | HHHEPEA |
| 154 | ACP119 | mdmrvpaqllgllllwlrgarcQVQLQQSGAELVRPGTSVKVSCKASGYAFTNYLIEWV |
| | NARA1 | KQRPGQGLEWIGVINPGSGGTNYNEKFKGKATLTADKSSSTAYMQLSSLTSD |
| | Vh/Vl | DSAVYFCARWRGDGYYAYFDVWGAGTTVTVSSSGGPGPAGMKGLPGSDIVL |
| | cleavable | TQSPASLAVSLGQRATISCKASQSVDYDGDSYMNWYQQKPGQPPKLLIYAAS |
| | | NLESGIPARFSGSGSGTDFTLNIHPVEEEDAATYYCQQSNEDPYTFGGGTKLEI |
| | | KHHHHHHEPEA |
| 155 | ACP120 | mdmrvpaqllgllllwlrgarcDIVLTQSPASLAVSLGQRATISCKASQSVDYDGDSYMN |
| | NARA1 | WYQQKPGQPPKLLIYAASNLESGIPARFSGSGSGTDFTLNIHPVEEEDAATYYC |
| | Vl/Vh | QQSNEDPYTFGGGTKLEIKggggsggggsggggsQVQLQQSGAELVRPGTSVKVSCK |
| | non- | ASGYAFTNYLIEWVKQRPGQGLEWIGVINPGSGGTNYNEKFKGKATLTADKS |
| | cleavable | SSTAYMQLSSLTSDDSAVYFCARWRGDGYYAYFDVWGAGTTVTVSSHHHHH |
| | | HEPEA |
| 156 | ACP121 | mdmrvpaqllgllllwlrgarcDIVLTQSPASLAVSLGQRATISCKASQSVDYDGDSYMN |
| | NARAl | WYQQKPGQPPKLLIYAASNLESGIPARFSGSGSGTDFTLNIHPVEEEDAATYYC |
| | Vl/Vh | QQSNEDPYTFGGGTKLEIKSGGPGPAGMKGLPGSQVQLQQSGAELVRPGTSV |
| | cleavable | KVSCKASGYAFTNYLIEWVKQRPGQGLEWIGVINPGSGGTNYNEKFKGKATL |
| | | TADKSSSTAYMQLSSLTSDDSAVYFCARWRGDGYYAYFDVWGAGTTVTVSS |
| | | HHHHHHEPEA |
| 157 | ACP124 | mdmrvpaqllgllllwlrgarcaptssstkktqlqlehllldlqmilnginnyknpkltrmltfkfympkkatelkhlqcle |
| | IL-2 | eelkpleevlnlaqsknfhlrprdlisninvivlelkgsettfmceyadetativeflnrwitfcqsiistltggggsggggsg |
| | fusion | gggsEVQLVESGGGLVQPGNSLRLSCAASGFTFSKFGMSWVRQAPGKGLEWVS |
| | protein | SISGSGRDTLYAESVKGRFTISRDNAKTTLYLQMNSLRPEDTAVYYCTIGGSLS |
| | (WW0159) | VSSQGTLVTVSSHHHHHHEPEA |
| 158 | ACP132 | mdmrvpaqllgllllwlrgarcaptssstkktqlqlehllldlqmilnginnyknpkltrmltfkfympkkatelkhlqcle |
| | IL-2 | eelkpleevlnlaqsknfhlrprdlisninvivlelkgsettfmceyadetativeflnrwitfcqsiistltggggsggggsg |
| | fusion | gggsdahksevahrfkdlgeenfkalvliafaqylqqcpfedhvklvnevtefaktcvadesaencdkslhtlfgdklctv |
| | protein | atlretygemadccakqepernecflqhkddnpnlprlvrpevdvmctafhdneetflkkylyeiarrhpylyapellff |
| | (WW0177) | akrykaafteccqaadkaacllpkldelrdegkassakqrlkcaslqkfgerafkawavarlsqrfpkaefaevsklvtdlt |
| | | kvhtecchgdllecaddradlakyicenqdsissklkeccekpllekshciaevendempadlpslaadfveskdvckn |
| | | yaeakdvflgmflyeyarrhpdysvvlllrlaktyettlekccaaadphecyakvfdefkplveepqnlikqncelfeqlg |
| | | eykfqnallvrytkkvpqvstptlvevsrnlgkvgskcckhpeakrmpcaedylsvvlnqlcvlhektpvsdrvtkcct |
| | | eslvnrrpcfsalevdetyvpkefnaetftfhadictlsekerqikkqtalvelvkhkpkatkeqlkavmddfaafvekcc |
| | | kaddketcfaeegkklvaasqaalglHHHHHHEPEA |
| 159 | ACP141 | mdmrvpaqllgllllwlrgarcaptssstkktqlqlehllldlqmilnginnyknpkltrmltfkfympkkatelkhlqcle |
| | IL-2 | eelkpleevlnlaqsknfhlrprdlisninvivlelkgsettfmceyadetativeflnrwitfcqsiistltggggsggggsg |
| | fusion | gggsdahksevahrfkdlgeenfkalvliafaqylqqcpfedhvklvnevtefaktcvadesaencdkslhtlfgdklctv |
| | protein | atlretygemadccakqepernecflqhkddnpnlprlvrpevdvmctafhdneetflkkylyeiarrhpylyapellff |
| | (WW0178) | akrykaafteccqaadkaacllpkldelrdegkassakqrlkcaslqkfgerafkawavarlsqrfpkaefaevsklvtdlt |
| | | kvhtecchgdllecaddradlakyicenqdsissklkeccekpllekshciaevendempadlpslaadfveskdvckn |
| | | yaeakdvflgmflyeyarrhpdysvvlllrlaktyettlekccaaadphecyakvfdefkplveepqnlikqncelfeqlg |
| | | eykfqnallvrytkkvpqvstptlvevsrnlgkvgskcckhpeakrmpcaedylsvvlnqlcvlhektpvsdrvtkcct |
| | | eslvnrrpcfsalevdetyvpkefnaetftfhadictlsekerqikkqtalvelvkhkpkatkeqlkavmddfaafvekcc |
| | | kaddketcfaeegkklvaasqaalglHHHHHHEPEA |
| 160 | ACP142 | mdmrvpaqllgllllwlrgarcaptssstkktqlqlehllldlqmilnginnyknpkltrmltfkfympkkatelkhlqcle |
| | IL-2 | eelkpleevlnlaqsknfhlrprdlisninvivlelkgsettfmceyadetativeflnrwitfcqsiistltSGGPGPAG |
| | fusion | MKGLPGSdahksevahrfkdlgeenfkalvliafaqylqqcpfedhvklvnevtefaktcvadesaencdkslhtlf |
| | protein | gdklctvatlretygemadccakqepernecflqhkddnpnlprlvrpevdvmctafhdneetflkkylyeiarrhpyf |
| | (WW0179) | yapellffakrykaafteccqaadkaacllpkldelrdegkassakqrlkcaslqkfgerafkawavarlsqrfpkaefaev |
| | | sklvtdltkvhtecchgdllecaddradlakyicenqdsissklkeccekpllekshciaevendempadlpslaadfves |
| | | kdvcknyaeakdvflgmflyeyarrhpdysvvlllrlktyettlekccaaadphecyakvfdefkplveepqnlikqn |
| | | celfeqlgeykfqnallvrytkkvpqvstptlvevsrnlgkvgskcckhpeakrmpcaedylsvvlnqlcvlhektpvs |
| | | drvtkccteslvnrrpcfsalevdetyvpkefnaetftfhadictlsekerqikkqtalvelvkhkpkatkeqlkavmddfa |
| | | afvekcckaddketcfaeegkklvaasqaalglHHHHHHEPEA |
| 161 | ACP144 | mdmrvpaqllgllllwlrgarcaptssstkktqlqlehllldlqmilnginnyknpkltrmltfkfympkkatelkhlqcle |
| | IL-2 | eelkpleevlnlaqsknfhlrprdlisninvivlelkgsettfmceyadetativeflnrwitfcqsiistltSGGPGPAG |
| | fusion | MKGLPGSEVQLVESGGGLVQPGNSLRLSCAASGFTFSKFGMSWVRQAPGKGL |
| | protein | EWVSSISGSGRDTLYAESVKGRFTISRDNAKTTLYLQMNSLRPEDTAVYYCTI |
| | | GGSLSVSSQGTLVTVSSggggsggggsggggsggggsggggsggggsSGGPGPAGMKGLPG |
| | | SEVQLVESGGGLVQPGGSLRLSCAASGFTFSSYTLAWVRQAPGKGLEWVAAI |
| | | DSSSYTYSPDTVRGRFTISRDNAKNSLYLQMNSLRAEDTAVYYCARDSNWDA |
| | | LDYWGQGTTVTVSSGGGGSGGGGSGGGGSDIQMTQSPSSLSASVGDRVTITC |
| | | KASQNVGTNVGWYQQKPGKAPKALIYSASFRYSGVPSRFSGSGSGTDFTLTIS |
| | | SLQPEDFATYYCQQYYTYPYTFGGGTKVEIKggggsggggsggggsQVQLQESGGG |
| | | LAQAGGSLSLSCAASGFTVSNSVMAWYRQTPGKQREFVAIINSVGSTNYADS |
| | | VKGRFTISRDNAKNTVYLQMNNLKPEDTAVYVCNRNFDRIYWGQGTQVTVS |
| | | SHHHHHHEPEA |
| 162 | ACP145 | mdmrvpaqllgllllwlrgarcQVQLQESGGGLAQAGGSLSLSCAASGFTVSNSVMAWY |
| | IL-2 | RQTPGKQREFVAIINSVGSTNYADSVKGRFTISRDNAKNTVYLQMNNLKPEDT |
| | fusion | AVYVCNRNFDRIYWGQGTQVTVSSggggsggggsggggsaptssstkktqlqlehllldlqmilngi |
| | protein | nnyknpkltrmltfkfympkkatelkhlqcleeelkpleevlnlaqsknfhlrprdlisninvivlelkgsettfmceyade |
| | | tativeflnrwitfcqsiistltSGGPGPAGMKGLPGSEVQLVESGGGLVQPGNSLRLSCAAS |
| | | GFTFSKFGMSWVRQAPGKGLEWVSSISGSGRDTLYAESVKGRFTISRDNAKTT |
| | | LYLQMNSLRPEDTAVYYCTIGGSLSVSSQGTLVTVSSggggsggggsggggsggggsgg |
| | | ggsggggsSGGPGPAGMKGLPGSEVQLVESGGGLVQPGGSLRLSCAASGFTFSSY |
| | | TLAWVRQAPGKGLEWVAAIDSSSYTYSPDTVRGRFTISRDNAKNSLYLQMNS |
| | | LRAEDTAVYYCARDSNWDALDYWGQGTTVTVSSGGGGSGGGGSGGGGSDI |
| | | QMTQSPSSLSASVGDRVTITCKASQNVGTNVGWYQQKPGKAPKALIYSASFR |
| | | YSGVPSRFSGSGSGTDFTLTISSLQPEDFATYYCQQYYTYPYTFGGGTKVEIKH |
| | | HHHHHEPEA |
| 163 | ACP146 | mdmrvpaqllgllllwlrgarcQVQLQESGGGLAQAGGSLSLSCAASGFTVSNSVMAWY |
| | IL-2 | RQTPGKQREFVAIINSVGSTNYADSVKGRFTISRDNAKNTVYLQMNNLKPEDT |
| | fusion | AVYVCNRNFDRIYWGQGTQVTVSSSGGPGPAGMKGLPGSaptssstkktqlqlehllldlq |
| | protein | milnginnyknpkltrmltfkfympkkatelkhlqcleeelkpleevlnlaqsknfhlrprdlisninvivlelkgsettfm |
| | | ceyadetativeflnrwitfcqsiistltSGGPGPAGMKGLPGSEVQLVESGGGLVQPGNSLRL |
| | | SCAASGFTFSKFGMSWVRQAPGKGLEWVSSISGSGRDTLYAESVKGRFTISRD |
| | | NAKTTLYLQMNSLRPEDTAVYYCTIGGSLSVSSQGTLVTVSSggggsggggsggggs |
| | | ggggsggggsggggsSGGPGPAGMKGLPGSEVQLVESGGGLVQPGGSLRLSCAASG |
| | | FTFSSYTLAWVRQAPGKGLEWVAAIDSSSYTYSPDTVRGRFTISRDNAKNSLY |
| | | LQMNSLRAEDTAVYYCARDSNWDALDYWGQGTTVTVSSGGGGSGGGGSGG |
| | | GGSDIQMTQSPSSLSASVGDRVTITCKASQNVGTNVGWYQQKPGKAPKALIYS |
| | | ASFRYSGVPSRFSGSGSGTDFTLTISSLQPEDFATYYCQQYYTYPYTFGGGTKV |
| | | EIKHHHHHHEPEA |
| 164 | ACP133 | mdmrvpaqllgllllwlrgarcaptssstkktqlqlehllldlqmilnginnyknpkltrmltfkfympkkatelkhlqcle |
| | (WW0196) | eelkpleevlnlaqsknfhlrprdlisninvivlelkgsettfmceyadetativeflnrwitfcqsiistltHHHHHH |
| | IL-2- | |
| | 6xHis | |
| | (“6xHis” | |
| | disclosed | |
| | as SEQ ID | |
| | NO.: 354) | |
| 165 | ACP147 | mdmrvpaqllgllllwlrgarcaptssstkktqlqlehllldlqmilnginnyknpkltrmltfkfympkkatelkhlqcle |
| | IL-2 | eelkpleevlnlaqsknfhlrprdlisninvivlelkgsettfmceyadetativeflnrwitfcqsiistltSGGPGPAG |
| | fusion | MKGLPGSEVQLVESGGGLVQPGNSLRLSCAASGFTFSKFGMSWVRQAPGKGL |
| | protein | EWVSSISGSGRDTLYAESVKGRFTISRDNAKTTLYLQMNSLRPEDTAVYYCTI |
| | | GGSLSVSSQGTLVTVSSggggsggggsggggsggggsggggsggggsSGGPGPAGMKGLPG |
| | | SEVQLVESGGGLVQPGGSLRLSCAASGFTFSSYTLAWVRQAPGKGLEWVAAI |
| | | DSSSYTYSPDTVRGRFTISRDNAKNSLYLQMNSLRAEDTAVYYCARDSNWDA |
| | | LDYWGQGTTVTVSSGGGGSGGGGSGGGGSDIQMTQSPSSLSASVGDRVTITC |
| | | KASQNVGTNVGWYQQKPGKAPKALIYSASFRYSGVPSRFSGSGSGTDFTLTIS |
| | | SLQPEDFATYYCQQYYTYPYTFGGGTKVEIKggggsggggsggggsQVQLQESGGG |
| | | LVQAGGSLRLSCAASGRIFSIDIMSWYRQAPGKQRELVARITRGGTISYDDSVK |
| | | GRFTISRDNAKNTVYLQMNSLKPEDTGVYYCNALYGTDYWGKGTQVTVSSH |
| | | HHHHHEPEA |
| 166 | ACP148 | mdmrvpaqllgllllwlrgarcQVQLQESGGGLVQAGGSLRLSCAASGRIFSIDIMSWYR |
| | IL-2 | QAPGKQRELVARITRGGTISYDDSVKGRFTISRDNAKNTVYLQMNSLKPEDTG |
| | fusion | VYYCNALYGTDYWGKGTQVTVSSggggsggggsggggsaptssstkktqlqlehllldlqmilngin |
| | protein | nyknpkitrmltfkfympkkatelkhlqcleeelkpleevlnlaqsknfhlrprdlisninvivlelkgsettfmceyadet |
| | | ativeflnrwitfcqsiistltSGGPGPAGMKGLPGSEVQLVESGGGLVQPGNSLRLSCAAS |
| | | GFTFSKFGMSWVRQAPGKGLEWVSSISGSGRDTLYAESVKGRFTISRDNAKTT |
| | | LYLQMNSLRPEDTAVYYCTIGGSLSVSSQGTLVTVSSggggsggggsggggsggggsgg |
| | | ggsggggsSGGPGPAGMKGLPGSEVQLVESGGGLVQPGGSLRLSCAASGFTFSSY |
| | | TLAWVRQAPGKGLEWVAAIDSSSYTYSPDTVRGRFTISRDNAKNSLYLQMNS |
| | | LRAEDTAVYYCARDSNWDALDYWGQGTTVTVSSGGGGSGGGGSGGGGSDI |
| | | QMTQSPSSLSASVGDRVTITCKASQNVGTNVGWYQQKPGKAPKALIYSASFR |
| | | YSGVPSRFSGSGSGTDFTLTISSLQPEDFATYYCQQYYTYPYTFGGGTKVEIKH |
| | | HHHHHEPEA |
| 167 | ACP149 | mdmrvpaqllgllllwlrgarcQVQLQESGGGLVQAGGSLRLSCAASGRIFSIDIMSWYR |
| | IL-2 | QAPGKQRELVARITRGGTISYDDSVKGRFTISRDNAKNTVYLQMNSLKPEDTG |
| | fusion | VYYCNALYGTDYWGKGTQVTVSSSGGPGPAGMKGLPGSaptssstkktqlqlehllldlq |
| | protein | milnginnyknpkltrmltfkfympkkatelkhlqcleeelkpleevlnlaqsknfhlrprdlisninvivlelkgsettfm |
| | | ceyadetativeflnrwitfcqsiistltSGGPGPAGMKGLPGSEVQLVESGGGLVQPGNSLRL |
| | | SCAASGFTFSKFGMSWVRQAPGKGLEWVSSISGSGRDTLYAESVKGRFTISRD |
| | | NAKTTLYLQMNSLRPEDTAVYYCTIGGSLSVSSQGTLVTVSSggggsggggsggggs |
| | | ggggsggggsggggsSGGPGPAGMKGLPGSEVQLVESGGGLVQPGGSLRLSCAASG |
| | | FTFSSYTLAWVRQAPGKGLEWVAAIDSSSYTYSPDTVRGRFTISRDNAKNSLY |
| | | LQMNSLRAEDTAVYYCARDSNWDALDYWGQGTTVTVSSGGGGSGGGGSGG |
| | | GGSDIQMTQSPSSLSASVGDRVTITCKASQNVGTNVGWYQQKPGKAPKALIYS |
| | | ASFRYSGVPSRFSGSGSGTDFTLTISSLQPEDFATYYCQQYYTYPYTFGGGTKV |
| | | EIKHHHHHHEPEA |
| 168 | ACP33 | mdmrvpaqllgllllwlrgarcEVQLVESGGGLVQPGNSLRLSCAASGFTFSKFGMSWVR |
| | Mouse | QAPGKGLEWVSSISGSGRDTLYAESVKGRFTISRDNAKTTLYLQMNSLRPEDT |
| | IFNa- | AVYYCTIGGSLSVSSQGTLVTVSSSGGPGPAGMKGLPGScdlpqthnlrnkraltllvqmrr |
| | fusion | lsplsclkdrkdfgfpqekvdaqqikkaqaipvlseltqqilniftskdssaawnttlldsfcndlhqqlndlqgclmqqvg |
| | protein | vqefpltqedallavrkyfhritvylrekkhspcawevvraevwralsssanvSGGPGPAGMKGLPGSEV |
| | | QLVESGGGLVQPGNSLRLSCAASGFTFSKFGMSWVRQAPGKGLEWVSSISGS |
| | | GRDTLYAESVKGRFTISRDNAKTTLYLQMNSLRPEDTAVYYCTIGGSLSVSSQ |
| | | GTLVTVSSHHHHHHEPEA |
| 169 | ACP131 | mdmrvpaqllgllllwlrgarccdlpqthnlrnkraltllvqmrrlsplsclkdrkdfgfpqekvdaqqikkaqaipvlsel |
| | Mouse | tqqilniftskdssaawnttlldsfcndlhqqlndlqgclmqqvgvqefpltqedallavrkyfhritvylrekkhspcawe |
| | IFNa | vvraevwralsssanvlgrlreekHHHHHHEPEA |
| 170 | ACP125 | mdmrvpaqllgllllwlrgarcEVQLVESGGGLVQPGNSLRLSCAASGFTFSKFGMSWVR |
| | Mouse | QAPGKGLEWVSSISGSGRDTLYAESVKGRFTISRDNAKTTLYLQMNSLRPEDT |
| | IFNa- | AVYYCTIGGSLSVSSQGTLVTVSSSGGPGPAGMKGLPGScdlpqthnlrnkraltllvqmrr |
| | fusion | lsplsclkdrkdfgfpqekvdaqqikkaqaipvlseltqqilniftskdssaawnttlldsfcndlhqqlndlqgclmqqvg |
| | protein | vqefpltqedallavrkyfhritvylrekkhspcawevvraevwralsssanvlgrlreekHHHHHHEPEA |
| 171 | ACP126 | mdmrvpaqllgllllwlrgarccdlpqthnlrnkraltllvqmrrlsplsclkdrkdfgfpqekvdaqqikkaqaipvlsel |
| | Mouse | tqqilniftskdssaawnttlldsfcndlhqqlndlqgclmqqvgvqefpltqedallavrkyfhritvylrekkhspcawe |
| | IFNa- | vvraevwralsssanvlgrlreekSGGPGPAGMKGLPGSEVQLVESGGGLVQPGNSLRLSC |
| | fusion | AASGFTFSKFGMSWVRQAPGKGLEWVSSISGSGRDTLYAESVKGRFTISRDNA |
| | protein | KTTLYLQMNSLRPEDTAVYYCTIGGSLSVSSQGTLVTVSSHHHHHHEPEA |
| 172 | ACP127 | mdmrvpaqllgllllwlrgarcEAHKSEIAHRYNDLGEQHFKGLVLIAFSQYLQKCSYDE |
| | Mouse | HAKLVQEVTDFAKTCVADESAANCDKSLHTLFGDKLCAIPNLRENYGELADC |
| | IFNa- | CTKQEPERNECFLQHKDDNPSLPPFERPEAEAMCTSFKENPTTFMGHYLHEVA |
| | fusion | RRHPYFYAPELLYYAEQYNEILTQCCAEADKESCLTPKLDGVKEKALVSSVRQ |
| | protein | RMKCSSMQKFGERAFKAWAVARLSQTFPNADFAEITKLATDLTKVNKECCH |
| | | GDLLECADDRAELAKYMCENQATISSKLQTCCDKPLLKKAHCLSEVEHDTMP |
| | | ADLPAIAADFVEDQEVCKNYAEAKDVFLGTFLYEYSRRHPDYSVSLLLRLAK |
| | | KYEATLEKCCAEANPPACYGTVLAEFQPLVEEPKNLVKTNCDLYEKLGEYGF |
| | | QNAILVRYTQKAPQVSTPTLVEAARNLGRVGTKCCTLPEDQRLPCVEDYLSAI |
| | | LNRVCLLHEKTPVSEHVTKCCSGSLVERRPCFSALTVDETYVPKEFKAETFTFH |
| | | SDICTLPEKEKQIKKQTALAELVKHKPKATAEQLKTVMDDFAQFLDTCCKAA |
| | | DKDTCFSTEGPNLVTRCKDALASGGPGPAGMKGLPGScdlpqthnlrnkraltllvqmrrls |
| | | plsclkdrkdfgfpqekvdaqqikkaqaipvlseltqqilniftskdssaawnttlldsfcndlhqqlndlqgclmqqvgv |
| | | qefpltqedallavrkyfhritvylrekkhspcawevvraevwralsssanvlgrlreekSGGPGPAGMKGLP |
| | | GSEAHKSEIAHRYNDLGEQHFKGLVLIAFSQYLQKCSYDEHAKLVQEVTDFA |
| | | KTCVADESAANCDKSLHTLFGDKLCAIPNLRENYGELADCCTKQEPERNECFL |
| | | QHKDDNPSLPPFERPEAEAMCTSFKENPTTFMGHYLHEVARRHPYFYAPELLY |
| | | YAEQYNEILTQCCAEADKESCLTPKLDGVKEKALVSSVRQRMKCSSMQKFGE |
| | | RAFKAWAVARLSQTFPNADFAEITKLATDLTKVNKECCHGDLLECADDRAEL |
| | | AKYMCENQATISSKLQTCCDKPLLKKAHCLSEVEHDTMPADLPAIAADFVED |
| | | QEVCKNYAEAKDVFLGTFLYEYSRRHPDYSVSLLLRLAKKYEATLEKCCAEA |
| | | NPPACYGTVLAEFQPLVEEPKNLVKTNCDLYEKLGEYGFQNAILVRYTQKAP |
| | | QVSTPTLVEAARNLGRVGTKCCTLPEDQRLPCVEDYLSAILNRVCLLHEKTPV |
| | | SEHVTKCCSGSLVERRPCFSALTVDETYVPKEFKAETFTFHSDICTLPEKEKQIK |
| | | KQTALAELVKHKPKATAEQLKTVMDDFAQFLDTCCKAADKDTCFSTEGPNL |
| | | VTRCKDALAHHHHHHEPEA |
| 173 | ACP128 | mdmrvpaqllgllllwlrgarcEAHKSEIAHRYNDLGEQHFKGLVLIAFSQYLQKCSYDE |
| | Mouse | HAKLVQEVTDFAKTCVADESAANCDKSLHTLFGDKLCAIPNLRENYGELADC |
| | IFNa- | CTKQEPERNECFLQHKDDNPSLPPFERPEAEAMCTSFKENPTTFMGHYLHEVA |
| | fusion | RRHPYFYAPELLYYAEQYNEILTQCCAEADKESCLTPKLDGVKEKALVSSVRQ |
| | protein | RMKCSSMQKFGERAFKAWAVARLSQTFPNADFAEITKLATDLTKVNKECCH |
| | | GDLLECADDRAELAKYMCENQATISSKLQTCCDKPLLKKAHCLSEVEHDTMP |
| | | ADLPAIAADFVEDQEVCKNYAEAKDVFLGTFLYEYSRRHPDYSVSLLLRLAK |
| | | KYEATLEKCCAEANPPACYGTVLAEFQPLVEEPKNLVKTNCDLYEKLGEYGF |
| | | QNAILVRYTQKAPQVSTPTLVEAARNLGRVGTKCCTLPEDQRLPCVEDYLSAI |
| | | LNRVCLLHEKTPVSEHVTKCCSGSLVERRPCFSALTVDETYVPKEFKAETFTFH |
| | | SDICTLPEKEKQIKKQTALAELVKHKPKATAEQLKTVMDDFAQFLDTCCKAA |
| | | DKDTCFSTEGPNLVTRCKDALASGGPGPAGMKGLPGScdlpqthnlrnkraltllvqmrrls |
| | | plsclkdrkdfgfpqekvdaqqikkaqaipvlseltqqilniftskdssaawnttlldsfcndlhqqlndlqgclmqqvgv |
| | | qefpltqedallavrkyfhritvylrekkhspcawevvraevwralsssanvigrlreekHHHHHHEPEA |
| 174 | ACP129 | mdmrvpaqllgllllwlrgarccdlpqthnlrnkraltllvqmrrlsplsclkdrkdfgfpqekvdaqqikkaqaipvlsel |
| | Mouse | tqqilniftskdssaawnttlldsfcndlhqqlndlqgclmqqvgvqefpltqedallavrkyfhritvylrekkhspcawe |
| | IFNa- | vvraevwralsssanvlgrlreekSGGPGPAGMKGLPGSEAHKSEIAHRYNDLGEQHFKGL |
| | fusion | VLIAFSQYLQKCSYDEHAKLVQEVTDFAKTCVADESAANCDKSLHTLFGDKL |
| | protein | CAIPNLRENYGELADCCTKQEPERNECFLQHKDDNPSLPPFERPEAEAMCTSF |
| | | KENPTTFMGHYLHEVARRHPYFYAPELLYYAEQYNEILTQCCAEADKESCLTP |
| | | KLDGVKEKALVSSVRQRMKCSSMQKFGERAFKAWAVARLSQTFPNADFAEIT |
| | | KLATDLTKVNKECCHGDLLECADDRAELAKYMCENQATISSKLQTCCDKPLL |
| | | KKAHCLSEVEHDTMPADLPAIAADFVEDQEVCKNYAEAKDVFLGTFLYEYSR |
| | | RHPDYSVSLLLRLAKKYEATLEKCCAEANPPACYGTVLAEFQPLVEEPKNLVK |
| | | TNCDLYEKLGEYGFQNAILVRYTQKAPQVSTPTLVEAARNLGRVGTKCCTLP |
| | | EDQRLPCVEDYLSAILNRVCLLHEKTPVSEHVTKCCSGSLVERRPCFSALTVDE |
| | | TYVPKEFKAETFTFHSDICTLPEKEKQIKKQTALAELVKHKPKATAEQLKTVM |
| | | DDFAQFLDTCCKAADKDTCFSTEGPNLVTRCKDALAHHHHHHEPEA |
| 175 | ACP150 | mdmrvpaqllgllllwlrgarcQVQLQESGGGLAQAGGSLSLSCAASGFTVSNSVMAWY |
| | Mouse | RQTPGKQREFVAIINSVGSTNYADSVKGRFTISRDNAKNTVYLQMNNLKPEDT |
| | IFNa- | AVYVCNRNFDRIYWGQGTQVTVSSggggsggggsggggsEVQLVESGGGLVQPGNS |
| | fusion | LRLSCAASGFTFSKFGMSWVRQAPGKGLEWVSSISGSGRDTLYAESVKGRFTI |
| | protein | SRDNAKTTLYLQMNSLRPEDTAVYYCTIGGSLSVSSQGTLVTVSSSGGPGPAG |
| | | MKGLPGScdlpqthnlrnkraltllvqmrrlsplsclkdrkdfgfpqckvdaqqikkaqaipvlseltqqilniftskd |
| | | ssaawnttlldsfcndlhqqlndlqgclmqqvgvqefpltqedallavrkyfhritvylrekkhspcawevvraevwral |
| | | sssanvlgrlreekSGGPGPAGMKGLPGSEVQLVESGGGLVQPGNSLRLSCAASGFTF |
| | | SKFGMSWVRQAPGKGLEWVSSISGSGRDTLYAESVKGRFTISRDNAKTTLYL |
| | | QMNSLRPEDTAVYYCTIGGSLSVSSQGTLVTVSSHHHHHHEPEA |
| 176 | ACP151 | mdmrvpaqllgllllwlrgarcEVQLVESGGGLVQPGNSLRLSCAASGFTFSKFGMSWVR |
| | Mouse | QAPGKGLEWVSSISGSGRDTLYAESVKGRFTISRDNAKTTLYLQMNSLRPEDT |
| | IFNa- | AVYYCTIGGSLSVSSQGTLVTVSSSGGPGPAGMKGLPGScdlpqthnlrnkraltllvqmrr |
| | fusion | Isplsclkdrkdfgfpqekvdaqqikkaqaipvlseltqqilniftskdssaawnttlldsfcndlhqqlndlqgclmqqvg |
| | protein | vqefpltqedallavrkyfhritvylrekkhspcawevvraevwralsssanvlgrlreekSGGPGPAGMKGLP |
| | | GSEVQLVESGGGLVQPGNSLRLSCAASGFTFSKFGMSWVRQAPGKGLEWVSS |
| | | ISGSGRDTLYAESVKGRFTISRDNAKTTLYLQMNSLRPEDTAVYYCTIGGSLSV |
| | | SSQGTLVTVSSggggsggggsggggsQVQLQESGGGLAQAGGSLSLSCAASGFTVSN |
| | | SVMAWYRQTPGKQREFVAIINSVGSTNYADSVKGRFTISRDNAKNTVYLQMN |
| | | NLKPEDTAVYVCNRNFDRIYWGQGTQVTVSSHHHHHHEPEA |
| 177 | ACP152 | mdmrvpaqllgllllwlrgarcEVQLVESGGGLVQPGNSLRLSCAASGFTFSKFGMSWVR |
| | Mouse | QAPGKGLEWVSSISGSGRDTLYAESVKGRFTISRDNAKTTLYLQMNSLRPEDT |
| | IFNa- | AVYYCTIGGSLSVSSQGTLVTVSSggggsggggsggggscdlpqthnlrnkraltllvqmrrlsplscl |
| | fusion | kdrkdfgfpqekvdaqqikkaqaipvlseltqqilniftskdssaawnttlldsfcndlhqqlndlqgclmqqvgvqefpl |
| | protein | tqedallavrkyfhritvylrekkhspcawevvraevwralsssanvlgrlreekggggsggggsggggsEVQLVE |
| | | SGGGLVQPGNSLRLSCAASGFTFSKFGMSWVRQAPGKGLEWVSSISGSGRDTL |
| | | YAESVKGRFTISRDNAKTTLYLQMNSLRPEDTAVYYCTIGGSLSVSSQGTLVT |
| | | VSSHHHHHHEPEA |
| 178 | ACP153 | mdmrvpaqllgllllwlrgarcaptssstkktqlqlehllldlqmilnginnyknpkltrmltfkfympkkatelkhlqcle |
| | (WW0201) | eelkpleevlnlaqsknfhlrprdlisninvivlelkgsettfmceyadetativeflnrwitfcqsiistltsggpGPAGL |
| | (IL-2 | YAQpgsEVQLVESGGGLVQPGNSLRLSCAASGFTFSKFGMSWVRQAPGKGLE |
| | Conju- | WVSSISGSGRDTLYAESVKGRFTISRDNAKTTLYLQMNSLRPEDTAVYYCTIG |
| | gate) | GSLSVSSQGTLVTVSSggggsggggsggggsggggsggggsggggssggpGPAGLYAQpgsEV |
| | | QLVESGGGLVQPGGSLRLSCAASGFTFSSYTLAWVRQAPGKGLEWVAAIDSSS |
| | | YTYSPDTVRGRFTISRDNAKNSLYLQMNSLRAEDTAVYYCARDSNWDALDY |
| | | WGQGTTVTVSSGGGGSGGGGSGGGGSDIQMTQSPSSLSASVGDRVTITCKAS |
| | | QNVGTNVGWYQQKPGKAPKALIYSASFRYSGVPSRFSGSGSGTDFTLTISSLQP |
| | | EDFATYYCQQYYTYPYTFGGGTKVEIKHHHHHHEPEA |
| 179 | ACP154 | mdmrvpaqllgllllwlrgarcaptssstkktqlqlehllldlqmilnginnyknpkltrmltfkfympkkatelkhlqcle |
| | (WW0202) | eelkpleevlnlaqsknfhlrprdlisninvivlelkgsettfmceyadetativeflnrwitfcqsiistltsggpPGGPA |
| | (IL-2 | GIGpgsEVQLVESGGGLVQPGNSLRLSCAASGFTFSKFGMSWVRQAPGKGLEW |
| | Conju- | VSSISGSGRDTLYAESVKGRFTISRDNAKTTLYLQMNSLRPEDTAVYYCTIGGS |
| | gate) | LSVSSQGTLVTVSSggggsggggsggggsggggsggggsggggssggpPGGPAGIGpgsEVQLV |
| | | ESGGGLVQPGGSLRLSCAASGFTFSSYTLAWVRQAPGKGLEWVAAIDSSSYTY |
| | | SPDTVRGRFTISRDNAKNSLYLQMNSLRAEDTAVYYCARDSNWDALDYWGQ |
| | | GTTVTVSSGGGGSGGGGSGGGGSDIQMTQSPSSLSASVGDRVTITCKASQNVG |
| | | TNVGWYQQKPGKAPKALIYSASFRYSGVPSRFSGSGSGTDFTLTISSLQPEDFA |
| | | TYYCQQYYTYPYTFGGGTKVEIKHHHHHHEPEA |
| 180 | ACP155 | mdmrvpaqllgllllwlrgarcaptssstkktqlqlehllldlqmilnginnyknpkltrmltfkfympkkatelkhlqcle |
| | (WW0203) | eelkpleevlnlaqsknfhlrprdlisninvivlelkgsettfmceyadetativeflnrwitfcqsiistltsggpALFKSS |
| | (IL-2 | FPpgsEVQLVESGGGLVQPGNSLRLSCAASGFTFSKFGMSWVRQAPGKGLEWV |
| | Conju- | SSISGSGRDTLYAESVKGRFTISRDNAKTTLYLQMNSLRPEDTAVYYCTIGGSL |
| | gate) | SVSSQGTLVTVSSggggsggggsggggsggggsggggsggggssggpALFKSSFPpgsEVQLVE |
| | | SGGGLVQPGGSLRLSCAASGFTFSSYTLAWVRQAPGKGLEWVAAIDSSSYTYS |
| | | PDTVRGRFTISRDNAKNSLYLQMNSLRAEDTAVYYCARDSNWDALDYWGQG |
| | | TTVTVSSGGGGSGGGGSGGGGSDIQMTQSPSSLSASVGDRVTITCKASQNVGT |
| | | NVGWYQQKPGKAPKALIYSASFRYSGVPSRFSGSGSGTDFTLTISSLQPEDFAT |
| | | YYCQQYYTYPYTFGGGTKVEIKHHHHHHEPEA |
| 181 | ACP156 | mdmrvpaqllgllllwlrgarcaptssstkktqlqlehllldlqmilnginnyknpkltrmltfkfympkkatelkhlqcle |
| | (WW0204) | eelkpleevlnlaqsknfhlrprdlisninvivlelkgsettfmceyadetativeflnrwitfcqsiistltsggpPLAQK |
| | (IL-2 | LKSSpgsEVQLVESGGGLVQPGNSLRLSCAASGFTFSKFGMSWVRQAPGKGLE |
| | Conju- | WVSSISGSGRDTLYAESVKGRFTISRDNAKTTLYLQMNSLRPEDTAVYYCTIG |
| | gate) | GSLSVSSQGTLVTVSSggggsggggsggggsggggsggggsggggssggpPLAQKLKSSpgsEV |
| | | QLVESGGGLVQPGGSLRLSCAASGFTFSSYTLAWVRQAPGKGLEWVAAIDSSS |
| | | YTYSPDTVRGRFTISRDNAKNSLYLQMNSLRAEDTAVYYCARDSNWDALDY |
| | | WGQGTTVTVSSGGGGSGGGGSGGGGSDIQMTQSPSSLSASVGDRVTITCKAS |
| | | QNVGTNVGWYQQKPGKAPKALIYSASFRYSGVPSRFSGSGSGTDFTLTISSLQP |
| | | EDFATYYCQQYYTYPYTFGGGTKVEIKHHHHHHEPEA |
| 182 | ACP157 | mdmrvpaqllgllllwlrgarcaptssstkktqlqlehllldlqmilnginnyknpkltrmltfkfympkkatelkhlqcle |
| | (WW0205) | eelkpleevlnlaqsknfhlrprdlisninvivlelkgsettfmceyadetativeflnrwitfcqsiistltsggpPGGPA |
| | (IL-2 | GIGalfkssfpPLAQKLKSSpgsEVQLVESGGGLVQPGNSLRLSCAASGFTFSKFGM |
| | Conju- | SWVRQAPGKGLEWVSSISGSGRDTLYAESVKGRFTISRDNAKTTLYLQMNSL |
| | gate) | RPEDTAVYYCTIGGSLSVSSQGTLVTVSSggggsggggsggggsggggsggggsggggssggp |
| | | PGGPAGIGalfkssfpPLAQKLKSSpgsEVQLVESGGGLVQPGGSLRLSCAASGFTFS |
| | | SYTLAWVRQAPGKGLEWVAAIDSSSYTYSPDTVRGRFTISRDNAKNSLYLQM |
| | | NSLRAEDTAVYYCARDSNWDALDYWGQGTTVTVSSGGGGSGGGGSGGGGS |
| | | DIQMTQSPSSLSASVGDRVTITCKASQNVGTNVGWYQQKPGKAPKALIYSASF |
| | | RYSGVPSRFSGSGSGTDFTLTISSLQPEDFATYYCQQYYTYPYTFGGGTKVEIK |
| | | HHHHHHEPEA |
| 183 | | Not assigned |
| 184 | | Not assigned |
| 185 | | Not assigned |
| 186 | | Not assigned |
| 187 | | Not assigned |
| 188 | | Not assigned |
| 189 | | Not assigned |
| 190 | | Not assigned |
| 191 | Blocker | mdmrvpaqllgllllwlrgarcEVQLVESGGGLVQPGGSLRLSCAASGFTFSSYTLAWVR |
| | 2 | QAPGKGLEWVAAIDSSSYTYSPDTVRGRFTISRDNAKNSLYLQMNSLRAEDTA |
| | (IL2 | VYYCARDSNWDALDYWGQGTTVTVSSggggsggggsggggsDIQMTQSPSSLSASV |
| | blocker) | GDRVTITCKASQNVGTNVGWYQQKPGKAPKALIYSASFRYSGVPSRFSGSGSG |
| | | TDFTLTISSLQPEDFATYYCQQYYTYPYTFGGGTKVEIKHHHHHH |
| 192 | Blocker | mdmrvpaqllgllllwlrgarcQSVLTQPPSVSGAPGQRVTISCSGSRSNIGSNTVKWYQQ |
| | 12 | LPGTAPKLLIYYNDQRPSGVPDRFSGSKSGTSASLAITGLQAEDEADYYCQSY |
| | (IL-12 | DRYTHPALLFGTGTKVTVLggggSggggSggggsQVQLVESGGGVVQPGRSLRLSC |
| | blocker) | AASGFTFSSYGMHWVRQAPGKGLEWVAFIRYDGSNKYYADSVKGRFTISRDN |
| | | SKNTLYLQMNSLRAEDTAVYYCKTHGSHDNWGQGTMVTVSSHHHHHH |
| 193 | Human_IF | cdlpqthslgsrrtlmllaqmrrislfsclkdrhdfgfpqeefgnqfqkaetipvlhemiqqifnlfstkdssaawdetlldk |
| | NA2b | fytelyqqlndleacviqgvgvtetplmkedsilavrkyfqritlylkekkyspcawevvraeimrsfslstnlqeslrske |
| | | HHHHHH** |
| 194 | ACP239- | iwelkkdvyvveldwypdapgemvvltcdtpeedgitwtldqssevlgsgktltiqvkefgdagqytchkggevlshs |
| | geneart | llllhkkedgiwstdilkdqkepknktflrceaknysgrftcwwlttistdltfsvkssrgssdpqgvtcgaatlsaervrgd |
| | | nkeyeysvecqedsacpaaeeslpievmvdavhklkyenytssffirdiikpdppknlqlkplknsrqvevsweypdt |
| | | wstphsyfsltfcvqvqgkskrekkdrvftdktsatvicrknasisvraqdryyssswsewasvpcsggggsggggsgg |
| | | ggsrvipvsgparclsqsrnllkttddmvktareklkhysctaedidheditrdqtstlktclplelhknesclatretssttr |
| | | gsclppqktslmmtlclgsiyedlkmyqtefqainaalqnhnhqqiildkgmlvaidelmqslnhngetlrqkppvgead |
| | | pyrvkmklcillhafstrvvtinrvmgylssahhhhhh |
| 195 | 3CYT5_sd | QVQLQESGGGLVQAGGSLRLSCAASGRTFSSVYDMGWFRQAPGKDREFVARI |
| | Ab | TESARNTRYADSVRGRFTISRDNAKNTVYLQMNNLELEDAAVYYCAADPQT |
| | | VVVGTPDYWGQGTQVTVSSAAAYPYDVPDYGSHHHHHH |
| 196 | ACP248 | QSVLTQPPSVSGAPGQRVTISCtGSsSNIGSNTVKWYQQLPGTAPKLLIYgNDQR |
| | | PSGVPDRFSGSKSGTSASLAITGLQAEDEADYYCQSYDRYTHPAyvFGTGTKVT |
| | | VLggggsggggsggggsQVQLVESGGGVVQPGRSLRLSCAASGFTFSSYGMHWVRQ |
| | | APGKGLEWVAFIRYDGSNKYYADSVKGRFTISRDNSKNTLYLQMNSLRAEDT |
| | | AVYYCKTHGSHDNWGQGTMVTVSSHHHHHH |
| 197 | ACP249 | QSVLTQPPSVSGAPGQRVTISCtGSsSNIGSNTVKWYQQLPGTAPKLLIYYNDQ |
| | | RPSGVPDRFSGSKSGTSASLAITGLQAEDEADYYCQSYDRYTHPAyvFGTGTK |
| | | VTVLggggsggggSggggsQVQLVESGGGVVQPGRSLRLSCAASGFTFSSYGMHWV |
| | | RQAPGKGLEWVAFIRYDGSNKYYADSVKGRFTISRDNSKNTLYLQMNSLRAE |
| | | DTAVYYCKTHGSHDNWGQGTMVTVSSHHHHHH |
| 198 | ACP250 | QSVLTQPPSVSGAPGQRVTISCSGSRSNIGSNTVKWYQQLPGTAPKLLIYYNDQ |
| | | RPSGVPDRFSGSKSGTSASLAITGLQAEDEADYYCQSYDRYTHPALLFGTGTK |
| | | VTVLggggsggggSggggsQVQLVESGGGVVQPGRSLRLSCAASGFTFSSYaMHWV |
| | | RQAPGKGLEWVAvIsYDGSNKYYADSVKGRFTISRDNSKNTLYLQMNSLRAE |
| | | DTAVYYCarHGSHDNWGQGTMVTVSSHHHHHH |
| 199 | ACP251 | QSVLTQPPSVSGAPGQRVTISCSGSRSNIGSNTVKWYQQLPGTAPKLLIYYNDQ |
| | | RPSGVPDRFSGSKSGTSASLAITGLQAEDEADYYCQSYDRYTHPALLFGTGTK |
| | | VTVLggggsggggSggggsQVQLVESGGGVVQPGRSLRLSCAASGFTFSSYGMHWV |
| | | RQAPGKGLEWVAFIRYeGSNKYYADSVKGRFTISRDNSKNTLYLQMNSLRAE |
| | | DTAVYYCKTHGSHDNWGQGTMVTVSSHHHHHH |
| 200 | ACP252 | QSVLTQPPSVSGAPGQRVTISCSGSRSNIGSNTVKWYQQLPGTAPKLLIYYNDQ |
| | | RPSGVPDRFSGSKSGTSASLAITGLQAEDEADYYCQSYDRYTHPALLFGTGTK |
| | | VTVLggggsggggSggggsQVQLVESGGGVVQPGRSLRLSCAASGFTFSSYGMHWV |
| | | RQAPGKGLEWVAFIRYDGSNKYYAeSVKGRFTISRDNSKNTLYLQMNSLRAE |
| | | DTAVYYCKTHGSHDNWGQGTMVTVSSHHHHHH |
| 201 | ACP253 | QSVLTQPPSVSGAPGQRVTISCSGSRSNIGSqTVKWYQQLPGTAPKLLIYYNDQ |
| | | RPSGVPDRFSGSKSGTSASLAITGLQAEDEADYYCQSYeRYTHPALLFGTGTKV |
| | | TVLggggsggggsggggsQVQLVESGGGVVQPGRSLRLSCAASGFTFSSYGMHWVR |
| | | QAPGKGLEWVAFIRYDGSNKYYADSVKGRFTISRDNSKNTLYLQMNSLRAED |
| | | TAVYYCKTHGSHDNWGQGTMVTVSSHHHHHH |
| 202 | ACP254 | QSVLTQPPSVSGAPGQRVTISCSGSRSNIGSqTVKWYQQLPGTAPKLLIYYNDQ |
| | | RPSGVPDRFSGSKSGTSASLAITGLQAEDEADYYCQSYsRYTHPALLFGTGTKV |
| | | TVLggggsggggsggggsQVQLVESGGGWQPGRSLRLSCAASGFTFSSYGMHWVR |
| | | QAPGKGLEWVAFIRYDGSNKYYADSVKGRFTISRDNSKNTLYLQMNSLRAED |
| | | TAVYYCKTHGSHDNWGQGTMVTVSSHHHHHH |
| 203 | ACP255 | QSVLTQPPSVSGAPGQRVTISCSGSeSNIGSNTVKWYQQLPGTAPKLLIYYNDQ |
| | | RPSGVPDRFSGSKSGTSASLAITGLQAEDEADYYCQSYDRYTHPALLFGTGTK |
| | | VTVLggggsggggsggggsQVQLVESGGGVVQPGRSLRLSCAASGFTFSSYGMHWV |
| | | RQAPGKGLEWVAFIRYDGSNKYYADSVKGRFTISRDNSKNTLYLQMNSLRAE |
| | | DTAVYYCKTHGSHDNWGQGTMVTVSSHHHHHH |
| 204 | ACP256 | QSVLTQPPSVSGAPGQRVTISCSGSSSNIGSNTVKWYQQLPGTAPKLLIYYNDQ |
| | | RPSGVPDRFSGSKSGTSASLAITGLQAEDEADYYCQSYDRYTHPALLFGTGTK |
| | | VTVLggggsggggSggggsQVQLVESGGGVVQPGRSLRLSCAASGFTFSSYGMHWV |
| | | RQAPGKGLEWVAFIRYDGSNKYYADSVKGRFTISRDNSKNTLYLQMNSLRAE |
| | | DTAVYYCKTHGSHDNWGQGTMVTVSSHHHHHH |
| 205 | ACP257 | QSVLTQPPSVSGAPGQRVTISCSGSRSNIGdNTVKWYQQLPGTAPKLLIYYNDQ |
| | | RPSGVPDRFSGSKSGTSASLAITGLQAEDEADYYCQSYDRYTHPALLFGTGTK |
| | | VTVLggggsggggSggggsQVQLVESGGGVVQPGRSLRLSCAASGFTFSSYGMHWV |
| | | RQAPGKGLEWVAFIRYDGSNKYYADSVKGRFTISRDNSKNTLYLQMNSLRAE |
| | | DTAVYYCKTHGSHDNWGQGTMVTVSSHHHHHH |
| 206 | ACP258 | QSVLTQPPSVSGAPGQRVTISCSGSRSNIGeNTVKWYQQLPGTAPKLLIYYNDQ |
| | | RPSGVPDRFSGSKSGTSASLAITGLQAEDEADYYCQSYDRYTHPALLFGTGTK |
| | | VTVLggggsggggSggggsQVQLVESGGGVVQPGRSLRLSCAASGFTFSSYGMHWV |
| | | RQAPGKGLEWVAFIRYDGSNKYYADSVKGRFTISRDNSKNTLYLQMNSLRAE |
| | | DTAVYYCKTHGSHDNWGQGTMVTVSSHHHHHH |
| 207 | ACP259 | QSVLTQPPSVSGAPGQRVTISCSGSRSNIGSdTVKWYQQLPGTAPKLLIYYNDQ |
| | | RPSGVPDRFSGSKSGTSASLAITGLQAEDEADYYCQSYDRYTHPALLFGTGTK |
| | | VTVLggggsggggSggggsQVQLVESGGGVVQPGRSLRLSCAASGFTFSSYGMHWV |
| | | RQAPGKGLEWVAFIRYDGSNKYYADSVKGRFTISRDNSKNTLYLQMNSLRAE |
| | | DTAVYYCKTHGSHDNWGQGTMVTVSSHHHHHH |
| 208 | ACP260 | QSVLTQPPSVSGAPGQRVTISCSGSRSNIGSeTVKWYQQLPGTAPKLLIYYNDQ |
| | | RPSGVPDRFSGSKSGTSASLAITGLQAEDEADYYCQSYDRYTHPALLFGTGTK |
| | | VTVLggggsggggSggggsQVQLVESGGGVVQPGRSLRLSCAASGFTFSSYGMHWV |
| | | RQAPGKGLEWVAFIRYDGSNKYYADSVKGRFTISRDNSKNTLYLQMNSLRAE |
| | | DTAVYYCKTHGSHDNWGQGTMVTVSSHHHHHH |
| 209 | ACP261 | QSVLTQPPSVSGAPGQRVTISCSGSRSNIGSNdVKWYQQLPGTAPKLLIYYNDQ |
| | | RPSGVPDRFSGSKSGTSASLAITGLQAEDEADYYCQSYDRYTHPALLFGTGTK |
| | | VTVLggggsggggsggggsQVQLVESGGGVVQPGRSLRLSCAASGFTFSSYGMHWV |
| | | RQAPGKGLEWVAFIRYDGSNKYYADSVKGRFTISRDNSKNTLYLQMNSLRAE |
| | | DTAVYYCKTHGSHDNWGQGTMVTVSSHHHHHH |
| 210 | ACP262 | QSVLTQPPSVSGAPGQRVTISCSGSRSNIGSNTVdWYQQLPGTAPKLLIYYNDQ |
| | | RPSGVPDRFSGSKSGTSASLAITGLQAEDEADYYCQSYDRYTHPALLFGTGTK |
| | | VTVLggggsggggSggggsQVQLVESGGGVVQPGRSLRLSCAASGFTFSSYGMHWV |
| | | RQAPGKGLEWVAFIRYDGSNKYYADSVKGRFTISRDNSKNTLYLQMNSLRAE |
| | | DTAVYYCKTHGSHDNWGQGTMVTVSSHHHHHH |
| 211 | ACP263 | QSVLTQPPSVSGAPGQRVTISCSGSRSNIGSNTVeWYQQLPGTAPKLLIYYNDQ |
| | | RPSGVPDRFSGSKSGTSASLAITGLQAEDEADYYCQSYDRYTHPALLFGTGTK |
| | | VTVLggggsggggSggggsQVQLVESGGGVVQPGRSLRLSCAASGFTFSSYGMHWV |
| | | RQAPGKGLEWVAFIRYDGSNKYYADSVKGRFTISRDNSKNTLYLQMNSLRAE |
| | | DTAVYYCKTHGSHDNWGQGTMVTVSSHHHHHH |
| 212 | ACP264 | QSVLTQPPSVSGAPGQRVTISCSGSRSNIGSNTVKWYQQLPGTAPKLLIYYNDQ |
| | | dPSGVPDRFSGSKSGTSASLAITGLQAEDEADYYCQSYDRYTHPALLFGTGTK |
| | | VTVLggggsggggsggggsQVQLVESGGGVVQPGRSLRLSCAASGFTFSSYGMHWV |
| | | RQAPGKGLEWVAFIRYDGSNKYYADSVKGRFTISRDNSKNTLYLQMNSLRAE |
| | | DTAVYYCKTHGSHDNWGQGTMVTVSSHHHHHH |
| 213 | ACP265 | QSVLTQPPSVSGAPGQRVTISCSGSRSNIGSNTVKWYQQLPGTAPKLLIYYNDQ |
| | | ePSGVPDRFSGSKSGTSASLAITGLQAEDEADYYCQSYDRYTHPALLFGTGTK |
| | | VTVLggggsggggSggggsQVQLVESGGGVVQPGRSLRLSCAASGFTFSSYGMHWV |
| | | RQAPGKGLEWVAFIRYDGSNKYYADSVKGRFTISRDNSKNTLYLQMNSLRAE |
| | | DTAVYYCKTHGSHDNWGQGTMVTVSSHHHHHH |
| 214 | ACP266 | QSVLTQPPSVSGAPGQRVTISCSGSRSNIGSNTVKWYQQLPGTAPKLLIYYNDQ |
| | | RPdGVPDRFSGSKSGTSASLAITGLQAEDEADYYCQSYDRYTHPALLFGTGTK |
| | | VTVLggggsggggsggggsQVQLVESGGGVVQPGRSLRLSCAASGFTFSSYGMHWV |
| | | RQAPGKGLEWVAFIRYDGSNKYYADSVKGRFTISRDNSKNTLYLQMNSLRAE |
| | | DTAVYYCKTHGSHDNWGQGTMVTVSSHHHHHH |
| 215 | ACP267 | QSVLTQPPSVSGAPGQRVTISCSGSRSNIGSNTVKWYQQLPGTAPKLLIYYNDQ |
| | | RPSGVPDRFSGSKSGTSASLAITGLQAEDEADYYCQSYDeYTHPALLFGTGTK |
| | | VTVLggggsggggsggggsQVQLVESGGGVVQPGRSLRLSCAASGFTFSSYGMHWV |
| | | RQAPGKGLEWVAFIRYDGSNKYYADSVKGRFTISRDNSKNTLYLQMNSLRAE |
| | | DTAVYYCKTHGSHDNWGQGTMVTVSSHHHHHH |
| 216 | ACP268 | QSVLTQPPSVSGAPGQRVTISCSGSRSNIGSNTVKWYQQLPGTAPKLLIYYNDQ |
| | | RPSGVPDRFSGSKSGTSASLAITGLQAEDEADYYCQSYDRYTdPALLFGTGTK |
| | | VTVLggggsggggsggggsQVQLVESGGGVVQPGRSLRLSCAASGFTFSSYGMHWV |
| | | RQAPGKGLEWVAFIRYDGSNKYYADSVKGRFTISRDNSKNTLYLQMNSLRAE |
| | | DTAVYYCKTHGSHDNWGQGTMVTVSSHHHHHH |
| 217 | ACP269 | QSVLTQPPSVSGAPGQRVTISCSGSeSNIGSNTVKWYQQLPGTAPKLLIYYNDQ |
| | | ePSGVPDRFSGSKSGTSASLAITGLQAEDEADYYCQSYDeYTHPALLFGTGTKV |
| | | TVLggggsggggsggggsQVQLVESGGGWQPGRSLRLSCAASGFTFSSYGMHWVR |
| | | QAPGKGLEWVAFIRYDGSNKYYADSVKGRFTISRDNSKNTLYLQMNSLRAED |
| | | TAVYYCKTHGSHDNWGQGTMVTVSSHHHHHH |
| 218 | ACP270 | QSVLTQPPSVSGAPGQRVTISCSGSeSNIGSNdVKWYQQLPGTAPKLLIYYNDQ |
| | | RPSGVPDRFSGSKSGTSASLAITGLQAEDEADYYCQSYDRYTHPALLFGTGTK |
| | | VTVLggggsggggsggggsQVQLVESGGGVVQPGRSLRLSCAASGFTFSSYGMHWV |
| | | RQAPGKGLEWVAFIRYDGSNKYYADSVKGRFTISRDNSKNTLYLQMNSLRAE |
| | | DTAVYYCKTHGSHDNWGQGTMVTVSSHHHHHH |
| 219 | ACP271 | QSVLTQPPSVSGAPGQRVTISCSGSRSNIGSNTVKWYQQLPGTAPKLLIYYNDQ |
| | | RPSGVPDRFSGSKSGTSASLAITGLQAEDEADYYCQSYDRYTHPALLFGTGTK |
| | | VTVLggggsggggsggggsQVQLVESGGGVVQPGRSLRLSCAASGFTFeSYGMHWV |
| | | RQAPGKGLEWVAFIRYDGSNKYYADSVKGRFTISRDNSKNTLYLQMNSLRAE |
| | | DTAVYYCKTHGSHDNWGQGTMVTVSSHHHHHH |
| 220 | ACP272 | QSVLTQPPSVSGAPGQRVTISCSGSRSNIGSNTVKWYQQLPGTAPKLLIYYNDQ |
| | | RPSGVPDRFSGSKSGTSASLAITGLQAEDEADYYCQSYDRYTHPALLFGTGTK |
| | | VTVLggggsggggsggggsQVQLVESGGGVVQPGRSLRLSCAASGFTFSeYGMHWV |
| | | RQAPGKGLEWVAFIRYDGSNKYYADSVKGRFTISRDNSKNTLYLQMNSLRAE |
| | | DTAVYYCKTHGSHDNWGQGTMVTVSSHHHHHH |
| 221 | ACP273 | QSVLTQPPSVSGAPGQRVTISCSGSRSNIGSNTVKWYQQLPGTAPKLLIYYNDQ |
| | | RPSGVPDRFSGSKSGTSASLAITGLQAEDEADYYCQSYDRYTHPALLFGTGTK |
| | | VTVLggggsggggsggggsQVQLVESGGGVVQPGRSLRLSCAASGFTFSdYGMHWV |
| | | RQAPGKGLEWVAFIRYDGSNKYYADSVKGRFTISRDNSKNTLYLQMNSLRAE |
| | | DTAVYYCKTHGSHDNWGQGTMVTVSSHHHHHH |
| 222 | ACP274 | QSVLTQPPSVSGAPGQRVTISCSGSRSNIGSNTVKWYQQLPGTAPKLLIYYNDQ |
| | | RPSGVPDRFSGSKSGTSASLAITGLQAEDEADYYCQSYDRYTHPALLFGTGTK |
| | | VTVLggggsggggsggggsQVQLVESGGGVVQPGRSLRLSCAASGFTFSSYGMHWV |
| | | RQAPGKGLEWVAFIeYDGSNKYYADSVKGRFTISRDNSKNTLYLQMNSLRAE |
| | | DTAVYYCKTHGSHDNWGQGTMVTVSSHHHHHH |
| 223 | ACP275 | QSVLTQPPSVSGAPGQRVTISCSGSRSNIGSNTVKWYQQLPGTAPKLLIYYNDQ |
| | | RPSGVPDRFSGSKSGTSASLAITGLQAEDEADYYCQSYDRYTHPALLFGTGTK |
| | | VTVLggggsggggsggggsQVQLVESGGGVVQPGRSLRLSCAASGFTFSSYGMHWV |
| | | RQAPGKGLEWVAFIdYDGSNKYYADSVKGRFTISRDNSKNTLYLQMNSLRAE |
| | | DTAVYYCKTHGSHDNWGQGTMVTVSSHHHHHH |
| 224 | ACP276 | QSVLTQPPSVSGAPGQRVTISCSGSRSNIGSNTVKWYQQLPGTAPKLLIYYNDQ |
| | | RPSGVPDRFSGSKSGTSASLAITGLQAEDEADYYCQSYDRYTHPALLFGTGTK |
| | | VTVLggggsggggsggggsQVQLVESGGGVVQPGRSLRLSCAASGFTFSSYGMHWV |
| | | RQAPGKGLEWVAFIRYDGSNdYYADSVKGRFTISRDNSKNTLYLQMNSLRAE |
| | | DTAVYYCKTHGSHDNWGQGTMVTVSSHHHHHH |
| 225 | ACP277 | QSVLTQPPSVSGAPGQRVTISCSGSRSNIGSNTVKWYQQLPGTAPKLLIYYNDQ |
| | | RPSGVPDRFSGSKSGTSASLAITGLQAEDEADYYCQSYDRYTHPALLFGTGTK |
| | | VTVLggggsggggsggggsQVQLVESGGGVVQPGRSLRLSCAASGFTFSSYGMHWV |
| | | RQAPGKGLEWVAFIRYDGSNeYYADSVKGRFTISRDNSKNTLYLQMNSLRAE |
| | | DTAVYYCKTHGSHDNWGQGTMVTVSSHHHHHH |
| 226 | ACP278 | QSVLTQPPSVSGAPGQRVTISCSGSRSNIGSNTVKWYQQLPGTAPKLLIYYNDQ |
| | | RPSGVPDRFSGSKSGTSASLAITGLQAEDEADYYCQSYDRYTHPALLFGTGTK |
| | | VTVLggggsggggsggggsQVQLVESGGGVVQPGRSLRLSCAASGFTFSSYGMHWV |
| | | RQAPGKGLEWVAFIRYDGSNKYYADSVeGRFTISRDNSKNTLYLQMNSLRAE |
| | | DTAVYYCKTHGSHDNWGQGTMVTVSSHHHHHH |
| 227 | ACP279 | QSVLTQPPSVSGAPGQRVTISCSGSRSNIGSNTVKWYQQLPGTAPKLLIYYNDQ |
| | | RPSGVPDRFSGSKSGTSASLAITGLQAEDEADYYCQSYDRYTHPALLFGTGTK |
| | | VTVLggggsggggsggggsQVQLVESGGGVVQPGRSLRLSCAASGFTFSSYGMHWV |
| | | RQAPGKGLEWVAFIRYDGSNKYYADSVKGRFTISRDNSKNTLYLQMNSLRAE |
| | | DTAVYYCKTHGSeDNWGQGTMVTVSSHHHHHH |
| 228 | ACP280 | QSVLTQPPSVSGAPGQRVTISCSGSRSNIGSNTVKWYQQLPGTAPKLLIYYNDQ |
| | | RPSGVPDRFSGSKSGTSASLAITGLQAEDEADYYCQSYDRYTHPALLFGTGTK |
| | | VTVLggggsggggsggggsQVQLVESGGGVVQPGRSLRLSCAASGFTFSSYGMHWV |
| | | RQAPGKGLEWVAFIeYDGSNKYYADSVeGRFTISRDNSKNTLYLQMNSLRAED |
| | | TAVYYCKTHGSHDNWGQGTMVTVSSHHHHHH |
| 229 | ACP281 | QSVLTQPPSVSGAPGQRVTISCSGSRSNIGSNTVKWYQQLPGTAPKLLIYYNDQ |
| | | RPSGVPDRFSGSKSGTSASLAITGLQAEDEADYYCQSYDRYTHPALLFGTGTK |
| | | VTVLggggsggggsggggsQVQLVESGGGVVQPGRSLRLSCAASGFTFSSYGMHWV |
| | | RQAPGKGLEWVAFIeYDGSNKYYADSVeGRFTISRDNSKNTLYLQMNSLRAED |
| | | TAVYYCKTHGSeDNWGQGTMVTVSSHHHHHH |
| 230 | ACP282 | QSVLTQPPSVSGAPGQRVTISCSGSRSNIGSNTVKWYQQLPGTAPKLLIYYNDQ |
| | | RPSGVPDRFSGSKSGTSASLAITGLQAEDEADYYCQSYDRYTHPALLFGTGTK |
| | | VTVLggggsggggsggggsQVQLVESGGGVVQPGRSLRLSCAASGFTFSSYGMHWV |
| | | RQAPGKGLEWVAFIRYDGSNKYYADSVKGRFTISRDNSKNTLYLQMNSLRAE |
| | | DTAVYYCKTHGSHDNWGQGTMVTVSSHHHHHH |
| 231 | ACP283 | iwelkkdvyvveldwypdapgemvvltcdtpeedgitwtldqssevlgsgktltiqvkefgdagq |
| | (WW0617) | ytchkggevlshsllllhkkedgiwstdilkdqkepknktflrceaknysgrftcwwlttistdl |
| | | tfsvkssrgssdpqgvtcgaatlsaervrgdnkeyeysvecqedsacpaaeeslpievmvdavhk |
| | | lkyenytssffirdiikpdppknlqlkplknsrqvevsweypdtwstphsyfsltfcv |
| | | qvqgkskrekkdrvftdktsatvicrknasisvraqdryyssswsewasvpcs |
| 232 | 3TOW69sd | QVQLQESGGGLVQTGGSLRLSCTTSGTIFSGYTMGWYRQAPGEQRELVAVISG |
| | Ab | GGDTNYADSVKGRFTISRDNTKDTMYLQMNSLKPEDTAVYYCYSREVTPPW |
| | | KLYWGQGTQVTVSSAAAYPYDVPDYGSHHHHHH |
| 233 | 3TOW85sd | QVQLQESGGGLVQEGGSLRLSCAASERIFSTDVMGWYRQAAEKQRELVAVVS |
| | Ab | ARGTTNYLDAVKGRFTISRDNARNTLTLQMNDLKPEDTASYYCYVRETTSPW |
| | | RIYWGQGTQVTVSSAAAYPYDVPDYGSHHHHHH |
| 234 | 2TOW91sd | QVQLQESGGGLVQAGGSLRLSCAASGSIFSANAMGWYRQAPGKQRELVAVIS |
| | Ab | SGGSTNYADSVKGRFTISRDNAKNTVYLQMNSLKPEDTAVYYCMYSGSYYY |
| | | TPNDYWGQGTQVTVSSAAAYPYDVPDYGSHHHHHH |
| 235 | ACP301 | evqlvesggglvqpggslrlscaasgftfssytlawvrqapgkglewvaaidsssytyspdt |
| | | vrgrftisrdnaknslylqmnslraedtavyycardsnwdaldywgqgttvtvssggggsgg |
| | | ggsggggsdiqmtqspsslsasvgdrvtitckasqnvgtnvgwyqqkpgkapkaliysasfr |
| | | ysgvpsrfsgsgsgtdftltisslqpedfatyycqqyytypytfgggtkveikhhhhhh |
| 236 | Hu2TOW9 | evqllesggglvqpggslrlscaasGSIFSANAMGwYrqapgkQReLvAVISSGGSTNYADSVK |
| | 1_A | GrftisrdnskntVylqmnslraedtavyycMYSGSYYYTPNDYwgqgtlvtvssAAAYPYDVPD |
| | | YGSHHHHHH** |
| 237 | Hu2TOW9 | evqllesggglvqpggslrlscaasGSIFSANAMGwYrqapgkgleLvAVISSGGSTNYADSVKG |
| | 1_B | rftisrdnskntVylqmnslraedtavyycMYSGSYYYTPNDYwgqgtlvtvssAAAYPYDVPDY |
| | | GSHHHHHH** |
| 238 | Hu2TOW9 | evqllesggglvqpggslrlscaasGSIFSANAMGwvrqapgkglewvsVISSGGSTNYADSVKGr |
| | 1_C | ftisrdnskntlylqmnslraedtavyycMYSGSYYYTPNDYwgqgtlvtvssAAAYPYDVPDYGS |
| | | HHHHHH** |
| 239 | Hu2TOW9 | QvqllesggglvqpggslrlscaasGSIFSANAMGwYrqapgkQReLvAVISSGGSTNYADSVK |
| | 1_D | GrftisrdnskntVylqmnslraedtavyycMYSGSYYYTPNDYwgqgtlvtvssAAAYPYDVPD |
| | | YGSHHHHHH** |
| 240 | HE_LM_2 | evqllesggglvqpggslrlscaasgSIfsANamGwYrqapgkgReLvAVissggstNyadsvkgrf |
| | TOW91 | tisrdnskntVylqmnslraedtavyycMYSGSYYYTPNDYWgqgtlvtvssAAAYPYDVPDYGSHH |
| | | HHHH** |
| 241 | HE_L_2T | QvqllesggglvqAggslrlscaasgSIfsANamGwYrqapgkQReLvAVissggstNyadsvkgrf |
| | OW91 | tisrdnskntVylqmnslraedtavyycMYSGSYYYTPNDYwgqgtlvtvssAAAYPYDVPDYGSHH |
| | | HHHH** |
| 242 | Hu3TOW8 | evqllesggglvqpggslrlscaasERIFSTDVMGwYrqapgkQReLvAVVSARGTTNYLDAV |
| | 5_A | KGrftisrdnskntlylqmnslraedtavyycYVRETTSPWRIYwgqgtlvtvssAAAYPYDVPDYG |
| | | SHHHHHH** |
| 243 | Hu3TOW8 | evqllesggglvqpggslrlscaasERIFSTDVMGwYrqapgkgleLvAVVSARGTTNYLDAVK |
| | 5_B | GrftisrdnskntlylqmnslraedtavyycYVRETTSPWRIYwgqgtlvtvssAAAYPYDVPDYGS |
| | | HHHHHH** |
| 244 | Hu3TOW8 | evqllesggglvqpggslrlscaasERIFSTDVMGwvrqapgkglewvsVVSARGTTNYLDAVKG |
| | 5_C | rftisrdnskntlylqmnslraedtavyycYVRETTSPWRIYwgqgtlvtvssAAAYPYDVPDYGSH |
| | | HHHHH** |
| 245 | Hu3TOW8 | QvqllesggglvqpggslrlscaasERIFSTDVMGwYrqapgkQReLvAWSARGTTNYLDAV |
| | 5_D | KGrftisrdnskntlylqmnslraedtavyycYVRETTSPWRIYwgqgtlvtvssAAAYPYDVPDYG |
| | | SHHHHHH** |
| 246 | HE_LM_3 | evqllesggglvqpggslrlscaasERIfsTDVmGwYrqapgkgReLvAVVsARgTtNyLdsvkgrf |
| | TOW85 | tisrdnskntlylqmnslraedtavyycYVRETTSPWRIywgqgtlvtvssAAAYPYDVPDYGSHHH |
| | | HHH** |
| 247 | HE_L_3T | QvqllesggglvqEggslrlscaasERIfsTDVmGwYrqaAgkQReLvAWsARgTtNyLdAvkgrf |
| | OW85 | tisrdnskntlylqmnslraedtaSyycYVRETTSPWRIywgqgtlvtvssAAAYPYDVPDYGSHH |
| | | HHHH** |
| 248 | HE_LM_R | evqllesggglvqpggslrlscaasERIfsTDVmGwYrqapgkgleLvAVVsARgTlNyLdsvkgrf |
| | 45L_3TO | tisrdnskntlylqmnslraedtavyycYVRETTSPWRIywgqgtlvtvssAAAYPYDVPDYGSHHH |
| | W85 | HHH** |
| 249 | Hu3TOW6 | evqllesggglvqpggslrlscaTsGTIFSGYTMGwYrqapgkQReLvAVISGGGDTNYADSV |
| | 9_A | KGrftisrdnskDtMylqmnslraedtavyycYSREVTPPWKLYwgqgtlvtvssAAAYPYDVPD |
| | | YGSHHHHHH** |
| 250 | Hu3TOW6 | evqllesggglvqpggslrlscaTsGTIFSGYTMGwYrqapgkgleLvAVISGGGDTNYADSVK |
| | 9_B | GrftisrdnskDtMylqmnslraedtavyycYSREVTPPWKLYwgqgtlvtvssAAAYPYDVPDY |
| | | GSHHHHHH** |
| 251 | Hu3TOW6 | evqllesggglvqpggslrlscaasGTIFSGYTMGwvrqapgkglewvsVISGGGDTNYADSVKGr |
| | 9_C | ftisrdnskntlylqmnslraedtavyycYSREVTPPWKLYwgqgtlvtvssAAAYPYDVPDYGSH |
| | | HHHHH** |
| 252 | Hu3TOW6 | QvqllesggglvqpggslrlscaTsGTIFSGYIMGwYrqapgkQReLvAVISGGGDTNYADSV |
| | 9_D | KGrftisrdnskDlMylqmnslraedtavyycYSREVTPPWKLYwgqgtlvtvssAAAYPYDVPD |
| | | YGSHHHHHH** |
| 253 | Hu3TOW6 | evqllesggglvqpggslrlscaTsGTIFSGYTMGwYrqapgkQReLvAVISGGGDTNYADSV |
| | 9_E | KGrftisrdnskntMylqmnslraedtavyycYSREVTPPWKLYwgqgtlvtvssAAAYPYDVPD |
| | | YGSHHHHHH** |
| 254 | HE_LM_3 | evqllesggglvqpggslrlscaTsgTIfsGyTmGwYrqapgkgReLvAVisGggDlNyadsvkgr |
| | TOW69 | ftisrdnskntMylqmnslraedtavyycYSREVTPPWKLywgqgtlvtvssAAAYPYDVPDYGSH |
| | | HHHHH** |
| 255 | HE_L_3T | QvqllesggglvqTggslrlscaTsgTIfsGyTmGwYrqapgkQReLvAVisGggDtNyadsvkgr |
| | OW69 | ftisrdnskDlMylqmnslraedtavyycYSREVTPPWKLywgqgtlvtvssAAAYPYDVPDYGSH |
| | | HHHHH** |
| 256 | HE_LM_R | evqllesggglvqpggslrlscaTsgTIfsGyTmGwYrqapgkgleLvAVisGggDlNyadsvkgr |
| | 45L_3TO | ftisrdnskntMyiqmnslraedtavyycYSREVTPPWKLywgqgtlvtvssAAAYPYDVPDYGSH |
| | W69 | HHHHH** |
| 257 | ACP363 | EVQLVESGGGLVQPGGSLRLSCAASGFTFSSYTLAWVRQAPGKGLEWVAAID |
| | (WW0441) | SSSYTYSPDTVRGRFTISRDNAKNSLYLQMNSLRAEDTAVYYCARDSNWDAL |
| | | DYWGQGTTVTVSSggggsggggsggggsDIQMTQSPSSLSASVGDRVTITCKAREKL |
| | | WSAVAWYQQKPGKAPKALIYSASFRYSGVPSRFSGSGSGTDFTLTISSLQPEDF |
| | | ATYYCQQYYTYPYTFGGGTKVEIKHHHHHH |
| 258 | ACP364 | EVQLVESGGGLVQPGGSLRLSCAASGFTFSSYTLAWVRQAPGKGLEWVAAID |
| | (WW0442) | SSSYTYSPDTVRGRFTISRDNAKNSLYLQMNSLRAEDTAVYYCARDSNWDAL |
| | | DYWGQGTTVTVSSggggsggggsggggsDIQMTQSPSSLSASVGDRVTITCKAREKL |
| | | WSAVAWYQQKPGKAPKsLIYSASFRYSGVPSRFSGSGSGTDFTLTISSLQPEDF |
| | | ATYYCQQYYTYPYTFGGGTKVEIKHHHHHH |
| 259 | ACP367 | EVQLVESGGGLVQPGGSLRLSCAASGFTFSSYTLAWVRQAPGKGLEWVAAID |
| | (WW0445) | SSSYTYSPDTVRGRFTISRDNAKNSLYLQMNSLRAEDTAVYYCARDSNWDAL |
| | | DYWGQGTTVTVSSggggsggggsggggsDIQMTQSPSSLSASVGDRVTITCKVTEKV |
| | | WGNVAWYQQKPGKAPISLIYSPSLRKSGVPSRFSGSGSGTDFTLTISSLQPEDF |
| | | ATYYCQQYYTYPYTFGGGTKVEIKHHHHHH |
| 260 | ACP369 | EVQLVESGGGLVQPGGSLRLSCAASGFTFSSYTLAWVRQAPGKGLEWVAAID |
| | (WW0449) | SSSYTYSPDTVRGRFTISRDNAKNSLYLQMNSLRAEDTAVYYCARDSNWDAL |
| | | DYWGQGTTVTVSSggggsggggsggggsDIQMTQSPSSLSASVGDRVTITCKSSEKL |
| | | WANVAWYQQKPGKAPKALIYSASFRYSGVPSRFSGSGSGTDFTLTISSLQPED |
| | | FATYYCQQYYTYPYTFGGGTKVEIKHHHHHH |
| 261 | ACP370 | EVQLVESGGGLVQPGGSLRLSCAASGFTFSSYTLAWVRQAPGKGLEWVAAID |
| | (WW0450) | SSSYTYSPDTVRGRFTISRDNAKNSLYLQMNSLRAEDTAVYYCARDSNWDAL |
| | | DYWGQGTTVTVSSggggsggggsggggsDIQMTQSPSSLSASVGDRVTITCKSSEKL |
| | | WANVAWYQQKPGKAPKsLIYSASFRYSGVPSRFSGSGSGTDFTLTISSLQPEDF |
| | | ATYYCQQYYTYPYTFGGGTKVEIKHHHHHH |
| 262 | ACP380 | DIQMTQSPSSLSASVGDRVTITCKASQNVGTNVGWYQQKPGKAPKALIYSASF |
| | (WW0522) | RYSGVPSRFSGSGSGTDFTLTISSLQPEDFATYYCQQYYTYPYTFGGGTKVEIKr |
| | | tvaapsvfifppsdeqlksgtasvvcllnnfypreakvqwkvdnalqsgnsqesvteqdskd |
| | | styslsstltlskadyekhkvyacevthqglsspvtksfnrgec |
| 263 | ACP381 | DIQMTQSPSSLSASVGDRVTITCKAREKLWSAVAWYQQKPGKAPKsLIYSASF |
| | (WW0523) | RYSGVPSRFSGSGSGTDFTLTISSLQPEDFATYYCQQYYTYPYTFGGGTKVEIKr |
| | | tvaapsvfifppsdeqlksgtasvvcllnnfypreakvqwkvdnalqsgnsqesvteqdskd |
| | | styslsstltlskadyekhkvyacevthqglsspvtksfnrgec |
| 264 | ACP382 | DIQMTQSPSSLSASVGDRVTITCKVTEKVWGNVAWYQQKPGKAPISLIYSPSL |
| | (WW0524) | RKSGVPSRFSGSGSGTDFTLTISSLQPEDFATYYCQQYYTYPYTFGGGTKVEIKr |
| | | tvaapsvfifppsdeqlksgtasvvcllnnfypreakvqwkvdnalqsgnsqesvteqdskd |
| | | styslsstltlskadyekhkvyacevthqglsspvtksfnrgec |
| 265 | ACP435 | DIQMTQSPSSLSASVGDRVTITCKAREKLWSAVAWYQQKPGKAPKsLIYSASF |
| | | RYSGVPSRFSGSGSGTDFTLTISSLQPEDFATYYCQQYYTYPYTFGGGTKVEIKr |
| | | tvaapsvfifppsdeqlksgtasvvcllnnfypreakvqwkvdnalqsgnsqesvteqdskd |
| | | styslsstltlskadyekhkvyacevthqglsspvtksfnrgecggggsggggsggggsggg |
| | | gsggggsggggsevqllesggglvqpggslrlscaasgsifsanamgwyrqapgkqrelvav |
| | | issggstnyadsvkgrftisrdnskntvylqmnslraedtavyycmysgsyyytpndywgqg |
| | | tlvtvss** |
| 266 | ACP436 | DIQMTQSPSSLSASVGDRVTITCKAREKLWSAVAWYQQKPGKAPKsLIYSASF |
| | (WW0578) | RYSGVPSRFSGSGSGTDFTLTISSLQPEDFATYYCQQYYTYPYTFGGGTKVEIKr |
| | | tvaapsvfifppsdeqlksgtasvvcllnnfypreakvqwkvdnalqsgnsqesvteqdskd |
| | | styslsstltlskadyekhkvyacevthqglsspvtksfnrgecggggsggggsggggsg |
| | | gggsggggsggggsevqllesggglvqpggslrlscaasgsifsanamgwyrqap |
| | | gkglelvavissggstnyadsvkgrftisrdnskntvylqmnslraedtavyycmysgsy |
| | | yytpndywgqgtlvtvss** |
| 267 | ACP437 | DIQMTQSPSSLSASVGDRVTITCKVTEKVWGNVAWYQQKPGKAPISLIYSPSL |
| | (WW0579) | RKSGVPSRFSGSGSGTDFTLTISSLQPEDFATYYCQQYYTYPYTFGGGTKVEIKr |
| | | tvaapsvfifppsdeqlksgtasvvcllnnfypreakvqwkvdnalqsgnsqesvteqdskd |
| | | styslsstltlskadyekhkvyacevthqglsspvtksfnrgecggggsggggsggggsggg |
| | | gsggggsggggsevaqllesggglvqpggslrlscasgsifsanamgwyrqapgkqrelvav |
| | | issggstnyadsvkgrftisrdnskntvylqmnslraedtavyycmysgsyyytpndywgqg |
| | | tlvtvss** |
| 268 | ACP438 | DIQMTQSPSSLSASVGDRVTITCKVTEKVWGNVAWYQQKPGKAPISLIYSPSL |
| | (WW0580) | RKSGVPSRFSGSGSGTDFTLTISSLQPEDFATYYCQQYYTYPYTFGGGTKVEIKr |
| | | tvaapsvfifppsdeqlksgtasvvcllnnfypreakvqwkvdnalqsgnsqesvteqdskdstyslsstltlskadyekh |
| | | kvyacevthqglsspvtksfnrgecggggsggggsggggsggggsggggsggggsevqllesggglvqpggslrlsca |
| | | asgsifsanamgwyrqapgkglelvavissggstnyadsvkgrftisrdnskntvylqmnslraedtavyycmysgsy |
| | | yytpndywggtlvtvss** |
| 269 | ACP448 | DIQMTQSPSSLSASVGDRVTITCKSSEKLWANVAWYQQKPGKAPKsLIYSASF |
| | (WW0590) | RYSGVPSRFSGSGSGTDFTLTISSLQPEDFATYYCQQYYTYPYTFGGGTKVEIKr |
| | | tvaapsvfifppsdeqlksgtasvvcllnnfypreakvqwkvdnalqsgnsqesvteqdskdsty |
| | | slsstltlskadyekhkvyacevthqglsspvtksfnrgec** |
| 270 | ACP449 | DIQMTQSPSSLSASVGDRVTITCKSSEKLWANVAWYQQKPGKAPKLLIYSASF |
| | (WW0591) | RYSGVPSRFSGSGSGTDFTLTISSLQPEDFATYYCQQYYTYPYTFGGGTKVEIKr |
| | | tvaapsvfifppsdeqlksgtasvvcllnnfypreakvqwkvdnalqsgnsqesvteqdskdsty |
| | | slsstltlskadyekhkvyacevthqglsspvtksfnrgec** |
| 271 | ACP450 | DIQMTQSPSSLSASVGDRVTITCKAREKLWSAVAWYQQKPGKAPKLLIYSASF |
| | (WW0592) | RYSGVPSRFSGSGSGTDFTLTISSLQPEDFATYYCQQYYTYPYTFGGGTKVEIKr |
| | | tvaapsvfifppsdeqlksgtasvvcllnnfypreakvqwkvdnalqsgnsqesvteqdskdsty |
| | | slsstltlskadyekhkvyacevthqglsspvtksfnrgec** |
| 272 | ACP439 | aptssstkktqlqlehllldlqmilnginnyknpkltrmltfkfympkkatelkhlqcleeelkpleevlnlaqsknfhlrpr |
| | (WW0581) | dlisninvivlelkgsettfmceyadetativeflnrwitfcqsiistltsggpGPAGLYAQpgsEVQLVESGG |
| | | GLVQPGNSLRLSCAASGFTFSKFGMSWVRQAPGKGLEWVSSISGSGRDTLYA |
| | | ESVKGRFTISRDNAKTTLYLQMNSLRPEDTAVYYCTIGGSLSVSSQGTLVTVSS |
| | | ggggsggggsggggsggggsggggsggggssggpGPAGLYAQpgsEVQLVESGGGLVQPGGS |
| | | LRLSCAASGFTFSSYTLAWVRQAPGKGLEWVAAIDSSSYTYSPDTVRGRFTISR |
| | | DNAKNSLYLQMNSLRAEDTAVYYCARDSNWDALDYWGQGTTVTVSSGGGG |
| | | SGGGGSGGGGSDIQMTQSPSSLSASVGDRVTITCKSSEKLWANVAWYQQKPG |
| | | KAPKALIYSASFRYSGVPSRFSGSGSGTDFTLTISSLQPEDFATYYCQQYYTYP |
| | | YTFGGGTKVEIK |
| 273 | ACP440 | aptssstkktqlqlehllldlqmilnginnyknpkltrmltfkfympkkatelkhlqcleeelkpleevlnlaqsknfhlrpr |
| | (WW0582) | dlisninvivlelkgsettfmceyadetativeflnrwitfcqsiistltsggpGPAGLYAQpgsEVQLVESGG |
| | | GLVQPGNSLRLSCAASGFTFSKFGMSWVRQAPGKGLEWVSSISGSGRDTLYA |
| | | ESVKGRFTISRDNAKTTLYLQMNSLRPEDTAVYYCTIGGSLSVSSQGTLVTVSS |
| | | ggggsggggsggggsggggsggggsggggssggpGPAGLYAQpgsEVQLVESGGGLVQPGGS |
| | | LRLSCAASGFTFSSYTLAWVRQAPGKGLEWVAAIDSSSYTYSPDTVRGRFTISR |
| | | DNAKNSLYLQMNSLRAEDTAVYYCARDSNWDALDYWGQGTTVTVSSGGGG |
| | | SGGGGSGGGGSDIQMTQSPSSLSASVGDRVTITCKSSEKLWANVAWYQQKPG |
| | | KAPKsLIYSASFRYSGVPSRFSGSGSGTDFTLTISSLQPEDFATYYCQQYYTYPY |
| | | TFGGGTKVEIK |
| 274 | ACP441 | aptssstkktqlqlehllldlqmilnginnyknpkltrmltfkfympkkatelkhlqcleeelkpleevlnlaqsknfhlrpr |
| | (WW0583) | dlisninvivlelkgsettfmceyadetativeflnrwitfcqsiistltsggpGPAGLYAQpgsEVQLVESGG |
| | | GLVQPGNSLRLSCAASGFTFSKFGMSWVRQAPGKGLEWVSSISGSGRDTLYA |
| | | ESVKGRFTISRDNAKTTLYLQMNSLRPEDTAVYYCTIGGSLSVSSQGTLVTVSS |
| | | ggggsggggsggggsggggsggggsggggssggpGPAGLYAQpgsEVQLVESGGGLVQPGGS |
| | | LRLSCAASGFTFSSYTLAWVRQAPGKGLEWVAAIDSSSYTYSPDTVRGRFTISR |
| | | DNAKNSLYLQMNSLRAEDTAVYYCARDSNWDALDYWGQGTTVTVSSGGGG |
| | | SGGGGSGGGGSDIQMTQSPSSLSASVGDRVTITCKSSEKLWANVAWYQQKPG |
| | | KAPKLLIYSASFRYSGVPSRFSGSGSGTDFTLTISSLQPEDFATYYCQQYYTYPY |
| | | TFGGGTKVEIK |
| 275 | ACP442 | aptssstkktqlqlehllldlqmilnginnyknpkltrmltfkfympkkatelkhlqcleeelkpleevlnlaqsknfhlrpr |
| | (WW0584) | dlisninvivlelkgsettfmceyadetativeflnrwitfcqsiistltsggpGPAGLYAQpgsEVQLVESGG |
| | | GLVQPGNSLRLSCAASGFTFSKFGMSWVRQAPGKGLEWVSSISGSGRDTLYA |
| | | ESVKGRFTISRDNAKTTLYLQMNSLRPEDTAVYYCTIGGSLSVSSQGTLVTVSS |
| | | ggggsggggsggggsggggsggggsggggssggpGPAGLYAQpgsEVQLVESGGGLVQPGGS |
| | | LRLSCAASGFTFSSYTLAWVRQAPGKcLEWVAAIDSSSYTYSPDTVRGRFTISR |
| | | DNAKNSLYLQMNSLRAEDTAVYYCARDSNWDALDYWGQGTTVTVSSGGGG |
| | | SGGGGSGGGGSDIQMTQSPSSLSASVGDRVTITCKSSEKLWANVAWYQQKPG |
| | | KAPKsLIYSASFRYSGVPSRFSGSGSGTDFTLTISSLQPEDFATYYCQQYYTYPY |
| | | TFGcGTKVEIK |
| 276 | ACP443 | aptssstkktqlqlehllldlqmilnginnyknpkltrmltfkfympkkatelkhlqcleeelkpleevlnlaqsknfhlrpr |
| | (WW0585) | dlisninvivlelkgsettfmceyadetativeflnrwitfcqsiistltsggpGPAGLYAQpgsEVQLVESGG |
| | | GLVQPGNSLRLSCAASGFTFSKFGMSWVRQAPGKGLEWVSSISGSGRDTLYA |
| | | ESVKGRFTISRDNAKTTLYLQMNSLRPEDTAVYYCTIGGSLSVSSQGTLVTVSS |
| | | ggggsggggsggggsggggsggggsggggssggpGPAGLYAQpgsEVQLVESGGGLVQPGGS |
| | | LRLSCAASGFTFSSYTLAWVRQAPGKcLEWVAAIDSSSYTYSPDTVRGRFTISR |
| | | DNAKNSLYLQMNSLRAEDTAVYYCARDSNWDALDYWGQGTTVTVSSGGGG |
| | | SGGGGSGGGGSDIQMTQSPSSLSASVGDRVTITCKSSEKLWANVAWYQQKPG |
| | | KAPKLLIYSASFRYSGVPSRFSGSGSGTDFTLTISSLQPEDFATYYCQQYYTYPY |
| | | TFGcGTKVEIK |
| 277 | ACP444 | aptssstkktqlqlehllldlqmilnginnyknpkltrmltfkfympkkatelkhlqcleeelkpleevlnlaqsknfhlrpr |
| | (WW0586) | dlisninvivlelkgsettfmceyadetativeflnrwitfcqsiistltsggpGPAGLYAQpgsEVQLVESGG |
| | | GLVQPGNSLRLSCAASGFTFSKFGMSWVRQAPGKGLEWVSSISGSGRDTLYA |
| | | ESVKGRFTISRDNAKTTLYLQMNSLRPEDTAVYYCTIGGSLSVSSQGTLVTVSS |
| | | ggggsggggsggggsggggsggggsggggssggpGPAGLYAQpgsEVQLVESGGGLVQPGGS |
| | | LRLSCAASGFTFSSYTLAWVRQAPGKGLEWVAAIDSSSYTYSPDTVRGRFTISR |
| | | DNAKNSLYLQMNSLRAEDTAVYYCARDSNWDALDYWGcGTTVTVSSGGGG |
| | | SGGGGSGGGGSDIQMTQSPSSLSASVGDRVTITCKSSEKLWANVAWYQQKPG |
| | | KcPKALIYSASFRYSGVPSRFSGSGSGTDFTLTISSLQPEDFATYYCQQYYTYPY |
| | | TFGGGTKVEIK |
| 278 | ACP445 | aptssstkktqlqlehllldlqmilnginnyknpkltrmltfkfympkkatelkhlqcleeelkpleevlnlaqsknfhlrpr |
| | (WW0587) | dlisninvivlelkgsettfmceyadetativeflnrwitfcqsiistltsggpGPAGLYAQpgsEVQLVESGG |
| | | GLVQPGNSLRLSCAASGFTFSKFGMSWVRQAPGKGLEWVSSISGSGRDTLYA |
| | | ESVKGRFTISRDNAKTTLYLQMNSLRPEDTAVYYCTIGGSLSVSSQGTLVTVSS |
| | | ggggsggggsggggsggggsggggsggggssggpGPAGLYAQpgsEVQLVESGGGLVQPGGS |
| | | LRLSCAASGFTFSSYTLAWVRQAPGKGLEWVAAIDSSSYTYSPDTVRGRFTISR |
| | | DNAKNSLYLQMNSLRAEDTAVYYCARDSNWDALDYWGQGTTVTVSSsggpG |
| | | PAGLYAQpgsDIQMTQSPSSLSASVGDRVTITCKAREKLWSAVAWYQQKPGKA |
| | | PKLLIYSASFRYSGVPSRFSGSGSGTDFTLTISSLQPEDFATYYCQQYYTYPYTF |
| | | GGGTKVEIK |
| 279 | ACP446 | aptssstkktqlqlehllldlqmilnginnyknpkltrmltfkfympkkatelkhlqcleeelkpleevlnlaqsknfhlrpr |
| | (WW0588) | dlisninvivlelkgsettfmceyadetativeflnrwitfcqsiistltsggpGPAGLYAQpgsEVQLVESGG |
| | | GLVQPGNSLRLSCAASGFTFSKFGMSWVRQAPGKGLEWVSSISGSGRDTLYA |
| | | ESVKGRFTISRDNAKTTLYLQMNSLRPEDTAVYYCTIGGSLSVSSQGTLVTVSS |
| | | ggggsggggsggggsggggsggggsggggssggpGPAGLYAQpgsEVQLVESGGGLVQPGGS |
| | | LRLSCAASGFTFSSYTLAWVRQAPGKGLEWVAAIDSSSYTYSPDTVRGRFTISR |
| | | DNAKNSLYLQMNSLRAEDTAVYYCARDSNWDALDYWGQGTTVTVSSGGGG |
| | | SGGGGSGGGGSDIQMTQSPSSLSASVGDRVTITCKAREKLWSAVAWYQQKPG |
| | | KAPKLLIYSASFRYSGVPSRFSGSGSGTDFTLTISSLQPEDFATYYCQQYYTYPY |
| | | TFGGGTKVEIK |
| 280 | ACP447 | aptssstkktqlqlehllldlqmilnginnyknpkltrmltfkfympkkatelkhlqcleeelkpleevlnlaqsknfhlrpr |
| | (WW0589) | dlisninvivlelkgsettfmceyadetativeflnrwitfcqsiistltsggpGPAGLYAQpgsEVQLVESGG |
| | | GLVQPGNSLRLSCAASGFTFSKFGMSWVRQAPGKGLEWVSSISGSGRDTLYA |
| | | ESVKGRFTISRDNAKTTLYLQMNSLRPEDTAVYYCTIGGSLSVSSQGTLVTVSS |
| | | ggggsggggsggggsggggsggggsggggssggpGPAGLYAQpgsEVQLVESGGGLVQPGGS |
| | | LRLSCAASGFTFSSYTLAWVRQAPGKcLEWVAAIDSSSYTYSPDTVRGRFTISR |
| | | DNAKNSLYLQMNSLRAEDTAVYYCARDSNWDALDYWGQGTTVTVSSGGGG |
| | | SGGGGSGGGGSDIQMTQSPSSLSASVGDRVTITCKAREKLWSAVAWYQQKPG |
| | | KAPKLLIYSASFRYSGVPSRFSGSGSGTDFTLTISSLQPEDFATYYCQQYYTYPY |
| | | TFGcGTKVEIK |
| 281 | ACP451 | aptssstkktqlqlehllldlqmilnginnyknpkltrmltfkfympkkatelkhlqcleeelkpleevlnlaqsknfhlrpr |
| | (WW0615) | dlisninvivlelkgsettfmceyadetativeflnrwitfcqsiistltsggpALFKSSFPpgsEVQLVESGGG |
| | | LVQPGNSLRLSCAASGFTFSKFGMSWVRQAPGKGLEWVSSISGSGRDTLYAES |
| | | VKGRFTISRDNAKTTLYLQMNSLRPEDTAVYYCTIGGSLSVSSQGTLVTVSSgg |
| | | ggsggggsggggsggggsggggsggggssggpALFKSSFPpgsEVQLVESGGGLVQPGGSLRL |
| | | SCAASGFTFSSYTLAWVRQAPGKGLEWVAAIDSSSYTYSPDTVRGRFTISRDN |
| | | AKNSLYLQMNSLRAEDTAVYYCARDSNWDALDYWGQGTTVTVSSGGGGSG |
| | | GGGSGGGGSDIQMTQSPSSLSASVGDRVTITCKAREKLWSAVAWYQQKPGKA |
| | | PKsLIYSASFRYSGVPSRFSGSGSGTDFTLTISSLQPEDFATYYCQQYYTYPYTF |
| | | GGGTKVEIK** |
| 282 | ACP452 | aptssstkktqlqlehllldlqmilnginnyknpkltrmltfkfympkkatelkhlqcleeelkpleevlnlaqsknfhirpr |
| | (WW0616) | dlisninvivlelkgsettfmceyadetativeflnrwitfcqsiistltsggpALFKSSFPpgsEVQLVESGGG |
| | | LVQPGNSLRLSCAASGFTFSKFGMSWVRQAPGKGLEWVSSISGSGRDTLYAES |
| | | VKGRFTISRDNAKTTLYLQMNSLRPEDTAVYYCTIGGSLSVSSQGTLVTVSSgg |
| | | ggsggggsggggsggggsggggsggggssggpALFKSSFPpgsEVQLVESGGGLVQPGGSLRL |
| | | SCAASGFTFSSYTLAWVRQAPGKGLEWVAAIDSSSYTYSPDTVRGRFTISRDN |
| | | AKNSLYLQMNSLRAEDTAVYYCARDSNWDALDYWGQGTTVTVSSGGGGSG |
| | | GGGSGGGGSDIQMTQSPSSLSASVGDRVTITCKVTEKVWGNVAWYQQKPGK |
| | | APISLIYSPSLRKSGVPSRFSGSGSGTDFTLTISSLQPEDFATYYCQQYYTYPYTF |
| | | GGGTKVEIK** |
| 283 | ACP453 | aptssstkktqlqlehllldlqmilnginnyknpkltrmltfkfympkkatelkhlqcleeelkpleevlnlaqsknfhlrpr |
| | (WW0617) | dlisninvivlelkgsettfmceyadetativeflnrwitfcqsiistltsggpALFKSSFPpgsEVQLVESGGG |
| | | LVQPGNSLRLSCAASGFTFSKFGMSWVRQAPGKGLEWVSSISGSGRDTLYAES |
| | | VKGRFTISRDNAKTTLYLQMNSLRPEDTAVYYCTIGGSLSVSSQGTLVTVSSgg |
| | | ggsggggsggggsggggsggggsggggssggpALFKSSFPpgsEVQLVESGGGLVQPGGSLRL |
| | | SCAASGFTFSSYTLAWVRQAPGKcLEWVAAIDSSSYTYSPDTVRGRFTISRDNA |
| | | KNSLYLQMNSLRAEDTAVYYCARDSNWDALDYWGQGTTVTVSSGGGGSGG |
| | | GGSGGGGSDIQMTQSPSSLSASVGDRVTITCKAREKLWSAVAWYQQKPGKAP |
| | | KsLIYSASFRYSGVPSRFSGSGSGTDFTLTISSLQPEDFATYYCQQYYTYPYTFG |
| | | cGTKVEIK** |
| 284 | ACP454 | aptssstkktqlqlehllldlqmilnginnyknpkltrmltfkfympkkatelkhlqcleeelkpleevlnlaqsknfhlrpr |
| | (WW0618) | dlisninvivlelkgsettfmceyadetativeflnrwitfcqsiistltsggpALFKSSFPpgsEVQLVESGGG |
| | | LVQPGNSLRLSCAASGFTFSKFGMSWVRQAPGKGLEWVSSISGSGRDTLYAES |
| | | VKGRFTISRDNAKTTLYLQMNSLRPEDTAVYYCTIGGSLSVSSQGTLVTVSSgg |
| | | ggsggggsggggsggggsggggsggggssggpALFKSSFPpgsEVQLVESGGGLVQPGGSLRL |
| | | SCAASGFTFSSYTLAWVRQAPGKGLEWVAAIDSSSYTYSPDTVRGRFTISRDN |
| | | AKNSLYLQMNSLRAEDTAVYYCARDSNWDALDYWGcGTTVTVSSGGGGSG |
| | | GGGSGGGGSDIQMTQSPSSLSASVGDRVTITCKAREKLWSAVAWYQQKPGKc |
| | | PKALIYSASFRYSGVPSRFSGSGSGTDFTLTISSLQPEDFATYYCQQYYTYPYTF |
| | | GGGTKVEIK** |
| 285 | ACP455 | aptssstkktqlqlehllldlqmilnginnyknpkltrmltfkfympkkatelkhlqcleeelkpleevlnlaqsknfhlrpr |
| | (WW0619) | dlisninvivlelkgsettfmceyadetativeflnrwitfcqsiistltsggpALFKSSFPpgsEVQLVESGGG |
| | | LVQPGNSLRLSCAASGFTFSKFGMSWVRQAPGKGLEWVSSISGSGRDTLYAES |
| | | VKGRFTISRDNAKTTLYLQMNSLRPEDTAVYYCTIGGSLSVSSQGTLVTVSSgg |
| | | ggsggggsggggsggggsggggsggggssggpALFKSSFPpgsEVQLVESGGGLVQPGGSLRL |
| | | SCAASGFTFSSYTLAWVRQAPGKcLEWVAAIDSSSYTYSPDTVRGRFTISRDNA |
| | | KNSLYLQMNSLRAEDTAVYYCARDSNWDALDYWGQGTTVTVSSGGGGSGG |
| | | GGSGGGGSDIQMTQSPSSLSASVGDRVTITCKVTEKVWGNVAWYQQKPGKA |
| | | PISLIYSPSLRKSGVPSRFSGSGSGTDFTLTISSLQPEDFATYYCQQYYTYPYTFG |
| | | cGTKVEIK** |
| 441 | ACP456 | aptssstkktqlqlehllldlqmilnginnyknpkltrmltfkfympkkatelkhlqcleeelkpleevlnlaqsknfhlrpr |
| | (WW0620) | dlisninvivlelkgsettfmceyadetativeflnrwitfcqsiistltsggpALFKSSFPpgsEVQLVESGGG |
| | | LVQPGNSLRLSCAASGFTFSKFGMSWVRQAPGKGLEWVSSISGSGRDTLYAES |
| | | VKGRFTISRDNAKTTLYLQMNSLRPEDTAVYYCTIGGSLSVSSQGTLVTVSSgg |
| | | ggsggggsggggsggggsggggsggggssggpALFKSSFPpgsEVQLVESGGGLVQPGGSLRL |
| | | SCAASGFTFSSYTLAWVRQAPGKGLEWVAAIDSSSYTYSPDTVRGRFTISRDN |
| | | AKNSLYLQMNSLRAEDTAVYYCARDSNWDALDYWGcGTTVTVSSGGGGSG |
| | | GGGSGGGGSDIQMTQSPSSLSASVGDRVTITCKVTEKVWGNVAWYQQKPGKc |
| | | PISLIYSPSLRKSGVPSRFSGSGSGTDFTLTISSLQPEDFATYYCQQYYTYPYTFG |
| | | GGTKVEIK** |
| 286 | ACP457 | aptssstkktqlqlehllldlqmilnginnyknpkltrmltfkfympkkatelkhlqcleeelkpleevlnlaqsknfhlrpr |
| | (WW0621) | dlisninvivlelkgsettfmceyadetativeflnrwitfcqsiistltsggpALFKSSFPpgsEVQLVESGGG |
| | | LVQPGNSLRLSCAASGFTFSKFGMSWVRQAPGKGLEWVSSISGSGRDTLYAES |
| | | VKGRFTISRDNAKTTLYLQMNSLRPEDTAVYYCTIGGSLSVSSQGTLVTVSSgg |
| | | ggsggggsggggsggggsggggsggggssggpALFKSSFPpgsEVQLVESGGGLVQPGGSLRL |
| | | SCAASGFTFSSYTLAWVRQAPGKGLEWVAAIDSSSYTYSPDTVRGRFTISRDN |
| | | AKNSLYLQMNSLRAEDTAVYYCARDSNWDALDYWGQGTTVTVSSastkgpsvfp |
| | | lapsskstsggtaalgclvkdyfpepvtvswnsgaltsgvhtfpavlqssglyslssvvtvpssslgtqtyicnvnhkpsnt |
| | | kvdkrvepksc** |
| 287 | ACP458 | eskygppeppcpapeflggpsvflfppkpkdtlmisrtpevtcvvvdvsqedpevqfnwyvdgvevhnaktkpree |
| | (WW0622) | qfnstyrvvsvltvlhqdwlngkeykckvsnkglpssiektiskakgqprepqvytlppsqeemtknqvsltclvkgfy |
| | | psdiavewesngqpennykttppvldsdgsfflysrltvdksrwqegnvfscsvmhealhnhytqkslslslgksggp |
| | | ALFKSSFPpgsaptssstkktqlqlehllldlqmilnginnyknpkltrmltfkfympkkatelkhlqcleeelkplee |
| | | vlnlaqsknfhlrprdlisninvivlelkgsettfmceyadetativeflnrwitfcqsiistltggggsggggsggggsggg |
| | | gsggggsggggssggpALFKSSFPpgsEVQLVESGGGLVQPGGSLRLSCAASGFTFSSY |
| | | TLAWVRQAPGKGLEWVAAIDSSSYTYSPDTVRGRFTISRDNAKNSLYLQMNS |
| | | LRAEDTAVYYCARDSNWDALDYWGQGTTVTVSSastkgpsvfplapsskstsggtaalgclv |
| | | kdyfpepvtvswnsgaltsgvhtfpavlqssglyslssvvtvpssslgtqtyicnvnhkpsntkvdkrvepksc** |
| 288 | ACP459 | eskygppcppcpapeflggpsvflfppkpkdtlmisrtpevtcvvvdvsqedpevqfnwyvdgvevhnaktkpree |
| | (WW0623) | qfnstyrvvsvltvlhqdwlngkeykckvsnkglpssiektiskakgqprepqvytlppsqeemtknqvsltclvkgfy |
| | | psdiavewesngqpennykttppvldsdgsfflysrltvdksrwqegnvfscsvmhealhnhytqkslslslgksggp |
| | | ALFKSSFPpgsaptssstkktqlqlehllldlqmilnginnyknpkltrmltfkfympkkatelkhlqcleeelkplee |
| | | vlnlaqsknfhlrprdlisninvivlelkgsettfmceyadetativeflnrwitfcqsiistltggggsggggsggggsggg |
| | | gsggggsggggssggpALFKSSFPpgsEVQLVESGGGLVQPGGSLRLSCAASGFTFSSY |
| | | TLAWVRQAPGKGLEWVAAIDSSSYTYSPDTVRGRFTISRDNAKNSLYLQMNS |
| | | LRAEDTAVYYCARDSNWDALDYWGQGTTVTVSSGGGGSGGGGSGGGGSDI |
| | | QMTQSPSSLSASVGDRVTITCKAREKLWSAVAWYQQKPGKAPKsLIYSASFRY |
| | | SGVPSRFSGSGSGTDFTLTISSLQPEDFATYYCQQYYTYPYTFGGGTKVEIK** |
| 289 | ACP460 | eskygppcppcpapeflggpsvflfppkpkdtlmisrtpevtcvvvdvsqedpevqfnwyvdgvevhnaktkpree |
| | (WW0624) | qfnstyrvvsvltvlhqdwlngkeykckvsnkglpssiektiskakgqprepqvytlppsqeemtknqvsltclvkgfy |
| | | psdiavewesngqpennykttppvldsdgsfflysrltvdksrwqegnvfscsvmhealhnhytqkslslslgksggp |
| | | ALFKSSFPpgsaptssstkktqlqlehllldlqmilnginnykiipkltrmltfkfympkkatelkhlqcleeelkplee |
| | | vlnlaqsknfhlrprdlisninvivlelkgsettfmceyadetativeflnrwitfcqsiistltggggsggggsggggsggg |
| | | gsggggsggggssggpALFKSSFPpgsEVQLVESGGGLVQPGGSLRLSCAASGFTFSSY |
| | | TLAWVRQAPGKGLEWVAAIDSSSYTYSPDTVRGRFTISRDNAKNSLYLQMNS |
| | | LRAEDTAVYYCARDSNWDALDYWGQGTTVTVSSGGGGSGGGGSGGGGSDI |
| | | QMTQSPSSLSASVGDRVTITCKVTEKVWGNVAWYQQKPGKAPISLIYSPSLRK |
| | | SGVPSRFSGSGSGTDFTLTISSLQPEDFATYYCQQYYTYPYTFGGGTKVEIK** |
| 290 | ACP461 | eskygppcppcpapeflggpsvflfppkpkdtlmisrtpevtcvvvdvsqedpevqfnwyvdgvevhnaktkpree |
| | (WW0625) | qfnstyrvvsvltvlhqdwlngkeykckvsnkglpssiektiskakgqprepqvytlppsqeemtknqvsltclvkgfy |
| | | psdiavewesngqpennykttppvldsdgsfflysrltvdksrwqegnvfscsvmhealhnhytqkslslslgksggp |
| | | ALFKSSFPpgsaptssstkktqlqlehllldlqmilnginnykiipkltrmltfkfympkkatelkhlqcleeelkplee |
| | | vlnlaqsknfhlrprdlisninvivlelkgsettfmceyadetativeflnrwitfcqsiistltggggsggggsggggsggg |
| | | gsggggsggggssggpALFKSSFPpgsEVQLVESGGGLVQPGGSLRLSCAASGFTFSSY |
| | | TLAWVRQAPGKcLEWVAAIDSSSYTYSPDTVRGRFTISRDNAKNSLYLQMNSL |
| | | RAEDTAVYYCARDSNWDALDYWGQGTTVTVSSGGGGSGGGGSGGGGSDIQ |
| | | MTQSPSSLSASVGDRVTITCKAREKLWSAVAWYQQKPGKAPKsLIYSASFRYS |
| | | GVPSRFSGSGSGTDFTLTISSLQPEDFATYYCQQYYTYPYTFGcGTKVEIK** |
| 291 | ACP462 | eskygppcppcpapeflggpsvflfppkpkdtlmisrtpevtcvvvdvsqedpevqfnwyvdgvevhnaktkpree |
| | (WW0626) | qfnstyrvvsvltvlhqdwlngkeykckvsnkglpssiektiskakgqprepqvytlppsqeemtknqvsltclvkgfy |
| | | psdiavewesngqpennykttppvldsdgsfflysrltvdksrwqegnvfscsvmhealhnhytqkslslslgksggp |
| | | ALFKSSFPpgsaptssstkktqlqlehllldlqmilnginnyknpkltrmltfkfympkkatelkhlqcleeelkplee |
| | | vlnlaqsknfhlrprdlisninvivlelkgsettfmceyadetativeflnrwitfcqsiistltggggsggggsggggsggg |
| | | gsggggsggggssggpALFKSSFPpgsEVQLVESGGGLVQPGGSLRLSCAASGFTFSSY |
| | | TLAWVRQAPGKGLEWVAAIDSSSYTYSPDTVRGRFTISRDNAKNSLYLQMNS |
| | | LRAEDTAVYYCARDSNWDALDYWGcGTTVTVSSGGGGSGGGGSGGGGSDIQ |
| | | MTQSPSSLSASVGDRVTITCKAREKLWSAVAWYQQKPGKcPKALIYSASFRYS |
| | | GVPSRFSGSGSGTDFTLTISSLQPEDFATYYCQQYYTYPYTFGGGTKVEIK** |
| 292 | ACP463 | eskygppcppcpapeflggpsvflfppkpkdtlmisrtpevtcvvvdvsqedpevqfnwyvdgvevhnaktkpree |
| | (WW0627) | qfnstyrvvsvltvlhqdwlngkeykckvsnkglpssiektiskakgqprepqvytlppsqeemtknqvsltclvkgfy |
| | | psdiavewesngqpennykttppvldsdgsfflysrltvdksrwqegnvfscsvmhealhnhytqkslslslgksggp |
| | | ALFKSSFPpgsaptssstkktqlqlehllldlqmilnginnykiipkltrmltfkfympkkatelkhlqcleeelkplee |
| | | vlnlaqsknfhlrprdlisninvivlelkgsettfmceyadetativeflnrwitfcqsiistltggggsggggsggggsggg |
| | | gsggggsggggssggpALFKSSFPpgsEVQLVESGGGLVQPGGSLRLSCAASGFTFSSY |
| | | TLAWVRQAPGKcLEWVAAIDSSSYTYSPDTVRGRFTISRDNAKNSLYLQMNSL |
| | | RAEDTAVYYCARDSNWDALDYWGQGTTVTVSSGGGGSGGGGSGGGGSDIQ |
| | | MTQSPSSLSASVGDRVTITCKVTEKVWGNVAWYQQKPGKAPISLIYSPSLRKS |
| | | GVPSRFSGSGSGTDFTLTISSLQPEDFATYYCQQYYTYPYTFGcGTKVEIK** |
| 293 | ACP464 | eskygppcppcpapeflggpsvflfppkpkdtlmisrtpevtcvvvdvsqedpevqfnwyvdgvevhnaktkpree |
| | (WW0628) | qfnstyrvvsvltvlhqdwlngkeykckvsnkglpssiektiskakgqprepqvytlppsqeemtknqvsltclvkgfy |
| | | psdiavewesngqpennykttppvldsdgsfflysrltvdksrwqegnvfscsvmhealhnhytqkslslslgksggp |
| | | ALFKSSFPpgsaptssstkktqlqlehllldlqmilnginnykiipkltrmltfkfympkkatelkhlqcleeelkplee |
| | | vlnlaqsknfhlrprdlisninvivlelkgsettfmceyadetativeflnrwitfcqsiistltggggsggggsggggsggg |
| | | gsggggsggggssggpALFKSSFPpgsEVQLVESGGGLVQPGGSLRLSCAASGFTFSSY |
| | | ILAWVRQAPGKGLEWVAAIDSSSYTYSPDTVRGRFTISRDNAKNSLYLQMNS |
| | | LRAEDTAVYYCARDSNWDALDYWGcGTTVTVSSGGGGSGGGGSGGGGSDIQ |
| | | MTQSPSSLSASVGDRVTITCKVTEKVWGNVAWYQQKPGKcPISLIYSPSLRKS |
| | | GVPSRFSGSGSGTDFTLTISSLQPEDFATYYCQQYYTYPYTFGGGTKVEIK** |
| 294 | ACP465 | vprdcgckpcictvpevssvfifppkpkdvltitltpkvtcvvvdiskddpevqfswfvddvevhtaqtqpreeqfnstf |
| | (WW0629) | rsvselpimhqdwlngkefkcrvnsaafpapiektisktkgrpkapqvytipppkeqmakdkvsltcmitdffpeditv |
| | | ewqwngqpaenykntqpimdtdgsyfvysklnvqksnweagntftcsvlheglhiihhtekslshspgksggpAL |
| | | FKSSFPpgsaptssstkktqlqlehllldlqmilnginnyknpkltrmltfkfympkkatelkhlqcleeelkpleevln |
| | | laqsknfhlrprdlisninvivlelkgsettfmceyadetativeflnrwitfcqsiistltggggsggggsggggsggggsg |
| | | gggsggggssggpALFKSSFPpgsEVQLVESGGGLVQPGGSLRLSCAASGFTFSSYTL |
| | | AWVRQAPGKGLEWVAAIDSSSYTYSPDTVRGRFTISRDNAKNSLYLQMNSLR |
| | | AEDTAVYYCARDSNWDALDYWGQGTTVTVSSGGGGSGGGGSGGGGSDIQM |
| | | TQSPSSLSASVGDRVTITCKAREKLWSAVAWYQQKPGKAPKsLIYSASFRYSG |
| | | VPSRFSGSGSGTDFTLTISSLQPEDFATYYCQQYYTYPYTFGGGTKVEIK** |
| 295 | ACP466 | vprdcgckpcictvpevssvfifppkpkdvltitltpkvtcvvvdiskddpevqfswfvddvevhtaqtqpreeqfnstf |
| | (WW0630) | rsvselpimhqdwlngkefkcrvnsaafpapiektisktkgrpkapqvytipppkeqmakdkvsltcmitdffpeditv |
| | | ewqwngqpaenykntqpimdtdgsyfvysklnvqksnweagntftcsvlheglhnhhtekslshspgksggpAL |
| | | FKSSFPpgsaptssstkktqlqlehllldlqmilnginnyknpkltrmltfkfympkkatelkhlqcleeelkpleevln |
| | | laqsknfhlrprdlisninvivlelkgsettfmceyadetativeflnrwitfcqsiistltggggsggggsggggsggggsg |
| | | gggsggggssggpALFKSSFPpgsEVQLVESGGGLVQPGGSLRLSCAASGFTFSSYTL |
| | | AWVRQAPGKGLEWVAAIDSSSYTYSPDTVRGRFTISRDNAKNSLYLQMNSLR |
| | | AEDTAVYYCARDSNWDALDYWGQGTTVTVSSGGGGSGGGGSGGGGSDIQM |
| | | TQSPSSLSASVGDRVTITCKVTEKVWGNVAWYQQKPGKAPISLIYSPSLRKSG |
| | | VPSRFSGSGSGTDFTLTISSLQPEDFATYYCQQYYTYPYTFGGGTKVEIK** |
| 296 | ACP467 | vprdcgckpcictvpevssvfifppkpkdvltitltpkvtcvvvdiskddpevqfswfvddvevhtaqtqpreeqfnstf |
| | (WW0631) | rsvselpimhqdwlngkefkcrvnsaafpapiektisktkgrpkapqvytipppkeqmakdkvsltcmitdffpeditv |
| | | ewqwngqpaenykntqpimdtdgsyfvysklnvqksnweagntftcsvlheglhiihhtekslshspgksggpAL |
| | | FKSSFPpgsaptssstkktqlqlehllldlqmilnginnyknpkltrmltfkfympkkatelkhlqcleeelkpleevln |
| | | laqsknfhlrprdlisninvivlelkgsettfmceyadetativeflnrwitfcqsiistltggggsggggsggggsggggsg |
| | | gggsggggssggpALFKSSFPpgsEVQLVESGGGLVQPGGSLRLSCAASGFTFSSYTL |
| | | AWVRQAPGKcLEWVAAIDSSSYTYSPDTVRGRFTISRDNAKNSLYLQMNSLR |
| | | AEDTAVYYCARDSNWDALDYWGQGTTVTVSSGGGGSGGGGSGGGGSDIQM |
| | | TQSPSSLSASVGDRVTITCKAREKLWSAVAWYQQKPGKAPKsLIYSASFRYSG |
| | | VPSRFSGSGSGTDFTLTISSLQPEDFATYYCQQYYTYPYTFGcGTKVEIK** |
| 297 | ACP468 | vprdcgckpcictvpevssvfifppkpkdvltitltpkvtcvvvdiskddpevqfswfvddvevhtaqtqpreeqfnstf |
| | (WW0632) | rsvselpimhqdwlngkefkcrvnsaafpapiektisktkgrpkapqvytipppkeqmakdkvsltcmitdffpeditv |
| | | ewqwngqpaenykntqpimdtdgsyfvysklnvqksnweagntftcsvlheglhnhhtekslshspgksggpAL |
| | | FKSSFPpgsaptssstkktqlqlehllldlqmilnginnyknpkltrmltfkfympkkatelkhlqcleeelkpleevln |
| | | laqsknfhlrprdlisninvivlelkgsettfmceyadetativeflnrwitfcqsiistltggggsggggsggggsggggsg |
| | | gggsggggssggpALFKSSFPpgsEVQLVESGGGLVQPGGSLRLSCAASGFTFSSYTL |
| | | AWVRQAPGKGLEWVAAIDSSSYTYSPDTVRGRFTISRDNAKNSLYLQMNSLR |
| | | AEDTAVYYCARDSNWDALDYWGcGTTVTVSSGGGGSGGGGSGGGGSDIQMT |
| | | QSPSSLSASVGDRVTITCKAREKLWSAVAWYQQKPGKcPKALIYSASFRYSGV |
| | | PSRFSGSGSGTDFTLTISSLQPEDFATYYCQQYYTYPYTFGGGTKVEIK** |
| 298 | ACP469 | vprdcgckpcictvpevssvfifppkpkdvltitltpkvtcvvvdiskddpevqfswfvddvevhtaqtqpreeqfnstf |
| | (WW0633) | rsvselpimhqdwlngkefkcrvnsaafpapiektisktkgrpkapqvytipppkeqmakdkvsltcmitdffpeditv |
| | | ewqwngqpaenykntqpimdtdgsyfvysklnvqksnweagntftcsvlheglhnhhtekslshspgksggpAL |
| | | FKSSFPpgsaptssstkktqlqlehllldlqmilnginnyknpkltrmltfkfympkkatelkhlqcleeelkpleevln |
| | | laqsknfhlrprdlisninvivlelkgsettfmceyadetativeflnrwitfcqsiistltggggsggggsggggsggggsg |
| | | gggsggggssggpALFKSSFPpgsEVQLVESGGGLVQPGGSLRLSCAASGFTFSSYTL |
| | | AWVRQAPGKcLEWVAAIDSSSYTYSPDTVRGRFTISRDNAKNSLYLQMNSLR |
| | | AEDTAVYYCARDSNWDALDYWGQGTTVTVSSGGGGSGGGGSGGGGSDIQM |
| | | TQSPSSLSASVGDRVTITCKVTEKVWGNVAWYQQKPGKAPISLIYSPSLRKSG |
| | | VPSRFSGSGSGTDFTLTISSLQPEDFATYYCQQYYTYPYTFGcGTKVEIK** |
| 299 | ACP470 | vprdcgckpcictvpevssvfifppkpkdvltitltpkvtcvvvdiskddpevqfswfvddvevhtaqtqpreeqfnstf |
| | (WW0634) | rsvselpimhqdwlngkefkcrvnsaafpapiektisktkgrpkapqvytipppkeqmakdkvsltcmitdffpeditv |
| | | ewqwngqpaenykntqpimdtdgsyfvysklnvqksnweagntftcsvlheglhnhhtekslshspgksggpAL |
| | | FKSSFPpgsaptssstkktqlqlehllldlqmilnginnyknpkltrmltfkfympkkatelkhlqcleeelkpleevln |
| | | laqsknfhlrprdlisninvivlelkgsettfmceyadetativeflnrwitfcqsiistltggggsggggsggggsggggsg |
| | | gggsggggssggpALFKSSFPpgsEVQLVESGGGLVQPGGSLRLSCAASGFTFSSYTL |
| | | AWVRQAPGKGLEWVAAIDSSSYTYSPDTVRGRFTISRDNAKNSLYLQMNSLR |
| | | AEDTAVYYCARDSNWDALDYWGcGTTVTVSSGGGGSGGGGSGGGGSDIQMT |
| | | QSPSSLSASVGDRVTITCKVTEKVWGNVAWYQQKPGKcPISLIYSPSLRKSGVP |
| | | SRFSGSGSGTDFTLTISSLQPEDFATYYCQQYYTYPYTFGGGTKVEIK** |
| 300 | ACP471 | mdmrvpaqllgllllwlrgarcvprdcgckpcictvpevssvfifppkpkdvltitltpkvtcvvvdiskddpevqfswf |
| | (WW0642) | vddvevhtaqtqpreeqfnstfrsvselpimhqdwlngkefkcrvnsaafpapiektisktkgrpkapqvytipppkeq |
| | | makdkvsltcmitdffpeditvewqwngqpaenykntqpimdtdgsyfvysklnvqksnweagntftcsvlheglh |
| | | nhlhtekslshspgksggpALFKSSFPpgsaptssstkktqlqlehllldlqmilnginnyknpkltrmltfkfympk |
| | | katelkhlqcleeelkpleevlnlaqsknfhlrprdlisninvivlelkgsettfmceyadetativeflnrwitfcqsiistltg |
| | | gggsggggsggggsggggsggggsggggssggpALFKSSFPpgsEVQLVESGGGLVQPGGSLR |
| | | LSCAASGFTFSSYTLAWVRQAPGKGLEWVAAIDSSSYTYSPDTVRGRFTISRD |
| | | NAKNSLYLQMNSLRAEDTAVYYCARDSNWDALDYWGQGTTVTVSSastkgpsv |
| | | fplapsskstsggtaalgclvkdyfpepvtvswnsgaltsgvhtfpavlqssglyslssvvtvpssslgtqtyicnvnhkps |
| | | ntkvdkrvepksc** |
| 301 | ACP382 | DIQMTQSPSSLSASVGDRVTITCKVTEKVWGNVAWYQQKPGKAPISLIYSPSL |
| | (WW0524) | RKSGVPSRFSGSGSGTDFTLTISSLQPEDFATYYCQQYYTYPYTFGGGTKVEIKr |
| | | tvaapsvfifppsdeqlksgtasvvcllnnfypreakvqwkvdnalqsgnsqesvteqdskdstyslsstltlskadyekh |
| | | kvyacevthqglsspvtksfnrgec** |
| 302 | ACP383 | eskygppcppcpapeflggpsvflfppkpkdtlmisrtpevtcvvvdvsqedpevqfnwyvdgvevhnaktkpree |
| | (WW0525) | qfnstyrvvsvltvlhqdwlngkeykckvsnkglpssiektiskakgqprepqvytlppsqeemtknqvsltclvkgfy |
| | | psdiavewesngqpennykttppvldsdgsfflysrltvdksrwqegnvfscsvmhealhnhytqkslslslgksggp |
| | | GPAGLYAQpgsaptssstkktqlqlehllldlqmilnginnyknpkltrmltfkfympkkatelkhlqcleeelkpl |
| | | eevlnlaqsknfhlrprdlisninvivlelkgsettfmceyadetativeflnrwitfcqsiistltggggsggggsggggsgg |
| | | ggsggggsggggssggpGPAGLYAQpgsEVQLVESGGGLVQPGGSLRLSCAASGFTFS |
| | | SYTLAWVRQAPGKcLEWVAAIDSSSYTYSPDTVRGRFTISRDNAKNSLYLQM |
| | | NSLRAEDTAVYYCARDSNWDALDYWGQGTTVTVSSGGGGSGGGGSGGGGS |
| | | DIQMTQSPSSLSASVGDRVTITCKASQNVGTNVGWYQQKPGKAPKALIYSASF |
| | | RYSGVPSRFSGSGSGTDFTLTISSLQPEDFATYYCQQYYTYPYTFGcGTKVEIK* |
| | | * |
| 303 | ACP384 | eskygppcppcpapeflggpsvflfppkpkdtlmisrtpevtcvvvdvsqedpevqfnwyvdgvevhnaktkpree |
| | (WW0526) | qfnstyrvvsvltvlhqdwlngkeykckvsnkglpssiektiskakgqprepqvytlppsqeemtknqvsltclvkgfy |
| | | psdiavewesngqpennykttppvldsdgsfflysrltvdksrwqegnvfscsvmhealhnhytqkslslslgksggp |
| | | GPAGLYAQpgsaptssstkktqlqlehllldlqmilnginnyknpkltrmltfkfympkkatelkhlqcleeelkpl |
| | | eevlnlaqsknfhlrprdlisninvivlelkgsettfmceyadetativeflnrwitfcqsiistltggggsggggsggggsgg |
| | | ggsggggsggggssggpGPAGLYAQpgsEVQLVESGGGLVQPGGSLRLSCAASGFTFS |
| | | SYTLAWVRQAPGKGLEWVAAIDSSSYTYSPDTVRGRFTISRDNAKNSLYLQM |
| | | NSLRAEDTAVYYCARDSNWDALDYWGcGTTVTVSSGGGGSGGGGSGGGGSD |
| | | IQMTQSPSSLSASVGDRVTITCKASQNVGTNVGWYQQKPGKcPKALIYSASFR |
| | | YSGVPSRFSGSGSGTDFTLTISSLQPEDFATYYCQQYYTYPYTFGGGTKVEIK** |
| 304 | ACP385 | eskygppcppcpapeflggpsvflfppkpkdtlmisrtpevtcvvvdvsqedpevqfnwyvdgvevhnaktkpree |
| | (WW0527) | qfnstyrvvsvltvlhqdwlngkeykckvsnkglpssiektiskakgqprepqvytlppsqeemtknqvsltclvkgfy |
| | | psdiavewesngqpennykttppvldsdgsfflysrltvdksrwqegnvfscsvmhealhnhytqkslslslgksggp |
| | | GPAGLYAQpgsaptssstkktqlqlehllldlqmilnginnyknpkltrmltfkfympkkatelkhlqcleeelkpl |
| | | eevlnlaqsknfhlrprdlisninvivlelkgsettfmceyadetativeflnrwitfcqsiistltggggsggggsggggsgg |
| | | ggsggggsggggssggpGPAGLYAQpgsEVQLVESGGGLVQPGGSLRLSCAASGFTFS |
| | | SYTLAWVRQAPGKcLEWVAAIDSSSYTYSPDTVRGRFTISRDNAKNSLYLQM |
| | | NSLRAEDTAVYYCARDSNWDALDYWGQGTTVTVSSGGGGSGGGGSGGGGS |
| | | DIQMTQSPSSLSASVGDRVTITCKAREKLWSAVAWYQQKPGKAPKALIYSASF |
| | | RYSGVPSRFSGSGSGTDFTLTISSLQPEDFATYYCQQYYTYPYTFGcGTKVEIK* |
| | | * |
| 305 | ACP386 | eskygppcppcpapeflggpsvflfppkpkdtlmisrtpevtcvvvdvsqedpevqfnwyvdgvevhnaktkpree |
| | (WW0528) | qfnstyrvvsvltvlhqdwlngkeykckvsnkglpssiektiskakgqprepqvytlppsqeemtknqvsltclvkgfy |
| | | psdiavewesngqpennykttppvldsdgsfflysrltvdksrwqegnvfscsvmhealhnhytqkslslslgksggp |
| | | GPAGLYAQpgsaptssstkktqlqlehllldlqmilnginnyknpkltrmltfkfympkkatelkhlqcleeelkpl |
| | | eevlnlaqsknfhlrprdlisninvivlelkgsettfmceyadetativeflnrwitfcqsiistltggggsggggsggggsgg |
| | | ggsggggsggggssggpGPAGLYAQpgsEVQLVESGGGLVQPGGSLRLSCAASGFTFS |
| | | SYTLAWVRQAPGKGLEWVAAIDSSSYTYSPDTVRGRFTISRDNAKNSLYLQM |
| | | NSLRAEDTAVYYCARDSNWDALDYWGcGTTVTVSSGGGGSGGGGSGGGGSD |
| | | IQMTQSPSSLSASVGDRVTITCKAREKLWSAVAWYQQKPGKcPKALIYSASFR |
| | | YSGVPSRFSGSGSGTDFTLTISSLQPEDFATYYCQQYYTYPYTFGGGTKVEIK** |
| 306 | ACP387 | eskygppcppcpapeflggpsvflfppkpkdtlmisrtpevtcvvvdvsqedpevqfnwyvdgvevhnaktkpree |
| | (WW0529) | qfnstyrvvsvltvlhqdwlngkeykckvsnkglpssiektiskakgqprepqvytlppsqeemtknqvsltclvkgfy |
| | | psdiavewesngqpennykttppvldsdgsfflysrltvdksrwqegnvfscsvmhealhnhytqkslslslgksggp |
| | | GPAGLYAQpgsaptssstkktqlqlehllldlqmilnginnyknpkltrmltfkfympkkatelkhlqcleeelkpl |
| | | eevlnlaqsknfhlrprdlisninvivlelkgsettfmceyadetativeflnrwitfcqsiistltggggsggggsggggsgg |
| | | ggsggggsggggssggpGPAGLYAQpgsEVQLVESGGGLVQPGGSLRLSCAASGFTFS |
| | | SYTLAWVRQAPGKcLEWVAAIDSSSYTYSPDTVRGRFTISRDNAKNSLYLQM |
| | | NSLRAEDTAVYYCARDSNWDALDYWGQGTTVTVSSGGGGSGGGGSGGGGS |
| | | DIQMTQSPSSLSASVGDRVTITCKVTEKVWGNVAWYQQKPGKAPISLIYSPSL |
| | | RKSGVPSRFSGSGSGTDFTLTISSLQPEDFATYYCQQYYTYPYTFGcGTKVEIK* |
| | | * |
| 307 | ACP388 | eskygppcppcpapeflggpsvflfppkpkdtlmisrtpevtcvvvdvsqedpevqfnwyvdgvevhnaktkpree |
| | (WW0530) | qfnstyrvvsvltvlhqdwlngkeykckvsnkglpssiektiskakgqprepqvytlppsqeemtknqvsltclvkgfy |
| | | psdiavewesngqpennykttppvldsdgsfflysrltvdksrwqegnvfscsvmhealhnhytqkslslslgksggp |
| | | GPAGLYAQpgsaptssstkktqlqlehllldlqmilnginnyknpkltrmltfkfympkkatelkhlqcleeelkpl |
| | | eevlnlaqsknfhlrprdlisninvivlelkgsettfmceyadetativeflnrwitfcqsiistltggggsggggsggggsgg |
| | | ggsggggsggggssggpGPAGLYAQpgsEVQLVESGGGLVQPGGSLRLSCAASGFTFS |
| | | SYTLAWVRQAPGKGLEWVAAIDSSSYTYSPDTVRGRFTISRDNAKNSLYLQM |
| | | NSLRAEDTAVYYCARDSNWDALDYWGcGTTVTVSSGGGGSGGGGSGGGGSD |
| | | IQMTQSPSSLSASVGDRVTITCKVTEKVWGNVAWYQQKPGKcPISLIYSPSLRK |
| | | SGVPSRFSGSGSGTDFTLTISSLQPEDFATYYCQQYYTYPYTFGGGTKVEIK** |
| 308 | ACP389 | eskygppcppcpapeflggpsvflfppkpkdtlmisrtpevtcvvvdvsqedpevqfnwyvdgvevhnaktkpree |
| | (WW0531) | qfnstyrvvsvltvlhqdwlngkeykckvsnkglpssiektiskakgqprepqvytlppsqeemtknqvsltclvkgfy |
| | | psdiavewesngqpennykttppvldsdgsfflysrltvdksrwqegnvfscsvmhealhnhytqkslslslgksggp |
| | | GPAGLYAQpgsaptssstkktqlqlehllldlqmilnginnyknpkltrmltfkfympkkatelkhlqcleeelkpl |
| | | eevlnlaqsknfhlrprdlisninvivlelkgsettfmceyadetativeflnrwitfcqsiistltggggsggggsggggsgg |
| | | ggsggggsggggssggpGPAGLYAQpgsevqllesggglvqpggslrlscaasgsifsanamgwyrqapgkqr |
| | | elvavissggstnyadsvkgrftisrdnskntvylqnuislraedtavyycmysgsyyytpndywgqgtlvtvss** |
| 309 | ACP390 | aptssstkktqlqlehllldlqmilnginnyknpkltrmltfkfympkkatelkhlqcleeelkpleevlnlaqsknfhlrpr |
| | (WW0532) | dlisninvivlelkgsettfmceyadetativeflnrwitfcqsiistltsggpGPAGLYAQpgsEVQLVESGG |
| | | GLVQPGNSLRLSCAASGFTFSKFGMSWVRQAPGKGLEWVSSISGSGRDTLYA |
| | | ESVKGRFTISRDNAKTTLYLQMNSLRPEDTAVYYCTIGGSLSVSSQGTLVTVSS |
| | | ggggsggggsggggsggggsggggsggggssggpGPAGLYAQpgsEVQLVESGGGLVQPGGS |
| | | LRLSCAASGFTFSSYTLAWVRQAPGKcLEWVAAIDSSSYTYSPDTVRGRFTISR |
| | | DNAKNSLYLQMNSLRAEDTAVYYCARDSNWDALDYWGQGTTVTVSSGGGG |
| | | SGGGGSGGGGSDIQMTQSPSSLSASVGDRVTITCKAREKLWSAVAWYQQKPG |
| | | KAPKsLIYSASFRYSGVPSRFSGSGSGTDFTLTISSLQPEDFATYYCQQYYTYPY |
| | | TFGcGTKVEIK** |
| 310 | ACP391 | eskygppcppcpapeflggpsvflfppkpkdtlmisrtpevtcvvvdvsqedpevqfnwyvdgvevhnaktkpree |
| | (WW0533) | qfnstyrvvsvltvlhqdwlngkeykckvsnkglpssiektiskakgqprepqvytlppsqeemtknqvsltclvkgfy |
| | | psdiavewesngqpennykttppvldsdgsfflysrltvdksrwqegnvfscsvmhealhnhytqkslslslgksggp |
| | | GPAGLYAQpgsaptssstkktqlqlehllldlqmilnginnyknpkltrmltfkfympkkatelkhlqcleeelkpl |
| | | eevlnlaqsknfhlrprdlisninvivlelkgsettfmceyadetativeflnrwitfcqsiistltggggsggggsggggsgg |
| | | ggsggggsggggssggpGPAGLYAQpgsEVQLVESGGGLVQPGGSLRLSCAASGFTFS |
| | | SYTLAWVRQAPGKcLEWVAAIDSSSYTYSPDTVRGRFTISRDNAKNSLYLQM |
| | | NSLRAEDTAVYYCARDSNWDALDYWGQGTTVTVSSGGGGSGGGGSGGGGS |
| | | DIQMTQSPSSLSASVGDRVTITCKAREKLWSAVAWYQQKPGKAPKsLIYSASF |
| | | RYSGVPSRFSGSGSGTDFTLTISSLQPEDFATYYCQQYYTYPYTFGcGTKVEIK* |
| | | * |
| 311 | ACP392 | aptssstkktqlqlehllldlqmilnginnyknpkltrmltfkfympkkatelkhlqcleeelkpleevlnlaqsknfhlrpr |
| | (WW0534) | dlisninvivlelkgsettfmceyadetativeflnrwitfcqsiistltsggpGPAGLYAQpgsggggsggggsggg |
| | | gsggggsggggsggggselcdddppeiphatfkamaykegtmlnceckrgfrriksgslymlctgnsshsswdnqc |
| | | qctssatrnttkqvtpqpeeqkerkttemqspmqpvdqaslpghcrepppweneateriyhlvvgqmvyyqcvqgy |
| | | ralhrgpaesvckmthgktrwtqpqlictgemetsqfpgeekpqaspegrpesetsSlvtttdfqiqtemaatmetsiftt |
| | | eyqsggpGPAGLYAQpgsEVQLVESGGGLVQPGNSLRLSCAASGFTFSKFGMSWV |
| | | RQAPGKGLEWVSSISGSGRDTLYAESVKGRFTISRDNAKTTLYLQMNSLRPED |
| | | TAVYYCTIGGSLSVSSQGTLVTVSSggggsggggsggggsggggsggggsggggssggpGPAG |
| | | LYAQpgsEVQLVESGGGLVQPGGSLRLSCAASGFTFSSYTLAWVRQAPGKcLE |
| | | WVAAIDSSSYTYSPDTVRGRFTISRDNAKNSLYLQMNSLRAEDTAVYYCARD |
| | | SNWDALDYWGQGTTVTVSSGGGGSGGGGSGGGGSDIQMTQSPSSLSASVGD |
| | | RVTITCKAREKLWSAVAWYQQKPGKAPKsLIYSASFRYSGVPSRFSGSGSGTD |
| | | FTLTISSLQPEDFATYYCQQYYTYPYTFGcGTKVEIK** |
| 312 | ACP393 | aptssstkktqlqlehllldlqmilnginnyknpkltrmltfklympkkatelkhlqcleeelkpleevlnlaqsknfhlrpr |
| | (WW0535) | dlisninvivlelkgsettfmceyadetativeflnrwitfcqsiistltsggpGPAGLYAQpgsggggsggggsggg |
| | | gsggggsggggsggggselcdddppeiphatfkamaykegtmlnceckrgfrriksgslymlctgnsshsswdnqc |
| | | qctssatnittkqvtpqpeeqkerkttemqspmqpvdqaslpghcrepppweneateriyhlvvgqmvyyqcvqgy |
| | | ralhrgpaesvckmthgktrwtqpqlictgemetsqfpgeekpqaspegrpesetsSlvtttdfqiqtemaatmetsiftt |
| | | eyqsggpGPAGLYAQpgsEVQLVESGGGLVQPGNSLRLSCAASGFTFSKFGMSWV |
| | | RQAPGKGLEWVSSISGSGRDTLYAESVKGRFTISRDNAKTTLYLQMNSLRPED |
| | | TAVYYCTIGGSLSVSSQGTLVTVSSggggsggggsggggsggggsggggsggggssggpGPAG |
| | | LYAQpgsEVQLVESGGGLVQPGGSLRLSCAASGFTFSSYTLAWVRQAPGKGLE |
| | | WVAAIDSSSYTYSPDTVRGRFTISRDNAKNSLYLQMNSLRAEDTAVYYCARD |
| | | SNWDALDYWGcGTTVTVSSGGGGSGGGGSGGGGSDIQMTQSPSSLSASVGDR |
| | | VTITCKAREKLWSAVAWYQQKPGKcPKALIYSASFRYSGVPSRFSGSGSGTDF |
| | | TLTISSLQPEDFATYYCQQYYTYPYTFGGGTKVEIK** |
| 313 | ACP394 | aptssstkktqlqlehllldlqmilnginnyknpkltrmltfklympkkatelkhlqcleeelkpleevlnlaqsknfhlrpr |
| | (WW0536) | dlismnvivlelkgsettfmceyadetativeflnrwitfcqsiistltsggpGPAGLYAQpgsggggsggggsggg |
| | | gsggggsggggsggggselcdddppeiphatfkamaykegtmlnceckrgfrriksgslymlctgnsshsswdnqc |
| | | qctssatnittkqvtpqpeeqkerkttemqspmqpvdqaslpghcrepppweneateriyhlvvgqmvyyqcvqgy |
| | | ralhrgpaesvckmthgktrwtqpqlictgemetsqfpgeekpqaspegrpesetsSlvtttdfqiqtemaatmetsiftt |
| | | eyqsggpGPAGLYAQpgsEVQLVESGGGLVQPGNSLRLSCAASGFTFSKFGMSWV |
| | | RQAPGKGLEWVSSISGSGRDTLYAESVKGRFTISRDNAKTTLYLQMNSLRPED |
| | | TAVYYCTIGGSLSVSSQGTLVTVSSggggsggggsggggsggggsggggsggggssggpGPAG |
| | | LYAQpgsEVQLVESGGGLVQPGGSLRLSCAASGFTFSSYTLAWVRQAPGKcLE |
| | | WVAAIDSSSYTYSPDTVRGRFTISRDNAKNSLYLQMNSLRAEDTAVYYCARD |
| | | SNWDALDYWGQGTTVTVSSGGGGSGGGGSGGGGSDIQMTQSPSSLSASVGD |
| | | RVTITCKVTEKVWGNVAWYQQKPGKAPISLIYSPSLRKSGVPSRFSGSGSGTD |
| | | FTLTISSLQPEDFATYYCQQYYTYPYTFGcGTKVEIK** |
| 314 | ACP395 | aptssstkktqlqlehllldlqmilnginnyknpkltrmltfklympkkatelkhlqcleeelkpleevlnlaqsknfhlrpr |
| | (WW0537) | dlismnvivlelkgsettfmceyadetativeflnrwitfcqsiistltsggpGPAGLYAQpgsggggsggggsggg |
| | | gsggggsggggsggggselcdddppeiphatfkamaykegtmlnceckrgfrriksgslymlctgnsshsswdnqc |
| | | qctssatnittkqvtpqpeeqkerkttemqspmqpvdqaslpghcrepppweneateriyhlvvgqmvyyqcvqgy |
| | | ralhrgpaesvckmthgktrwtqpqlictgemetsqfpgeekpqaspegrpesetsSlvtttdfqiqtemaatmetsiftt |
| | | eyqsggpGPAGLYAQpgsEVQLVESGGGLVQPGNSLRLSCAASGFTFSKFGMSWV |
| | | RQAPGKGLEWVSSISGSGRDTLYAESVKGRFTISRDNAKTTLYLQMNSLRPED |
| | | TAVYYCTIGGSLSVSSQGTLVTVSSggggsggggsggggsggggsggggsggggssggpGPAG |
| | | LYAQpgsEVQLVESGGGLVQPGGSLRLSCAASGFTFSSYTLAWVRQAPGKGLE |
| | | WVAAIDSSSYTYSPDTVRGRFTISRDNAKNSLYLQMNSLRAEDTAVYYCARD |
| | | SNWDALDYWGcGTTVTVSSGGGGSGGGGSGGGGSDIQMTQSPSSLSASVGDR |
| | | VTITCKVTEKVWGNVAWYQQKPGKcPISLIYSPSLRKSGVPSRFSGSGSGTDFT |
| | | LTISSLQPEDFATYYCQQYYTYPYTFGGGTKVEIK** |
| 315 | ACP396 | aptssstkktqlqlehllldlqmilnginnyknpkltrmltfkfympkkatelkhlqcleeelkpleevlnlaqsknfhlrpr |
| | (WW0538) | dlisninvivlelkgsettfmceyadetativeflnrwitfcqsiistltsggpGPAGLYAQpgsggggsggggsggg |
| | | gsggggsggggsggggselcdddppeiphatfkamaykegtmlnceckrgfrriksgslymlctgnsshsswdnqc |
| | | qctssatnittkqvtpqpeeqkerkttemqspmqpvdqaslpghcrepppweneateriyhlvvgqmvyyqcvqgy |
| | | ralhrgpaesvckmthgktrwtqpqlictgemetsqfpgeekpqaspegrpesetsSlvtttdfqiqtemaatmetsiftt |
| | | eyqsggpGPAGLYAQpgsEVQLVESGGGLVQPGNSLRLSCAASGFTFSKFGMSWV |
| | | RQAPGKGLEWVSSISGSGRDTLYAESVKGRFTISRDNAKTTLYLQMNSLRPED |
| | | TAVYYCTIGGSLSVSSQGTLVTVSSggggsggggsggggsggggsggggsggggssggpGPAG |
| | | LYAQpgsevqllesggglvqpggslrlscaasgsifsanamgwyrqapgkqrelvavissggstnyadsvkgrftisr |
| | | dnskntvylqmnslraedtavyycmysgsyyytpndywgqgtlvtvss** |
| 316 | ACP397 | aptssstkktqlqlehllldlqmilnginnyknpkltrmltfklympkkatelkhlqcleeelkpleevlnlaqsknfhlrpr |
| | (WW0539) | dlisninvivlelkgsettfmceyadetativeflnrwitfcqsiistltsggpGPAGLYAQpgsggggsggggsggg |
| | | gsggggsggggsggggselcdddppeiphatfkamaykegtmlnceckrgfrriksgslymlctgnsshsswdnqc |
| | | qctssatnittkqvtpqpeeqkerkttemqspmqpvdqaslpghcrepppweneateriyhlvvgqmvyyqcvqgy |
| | | ralhrgpaesvckmthgktrwtqpqlictgemetsqfpgeekpqaspegrpesetsSlvtttdfqiqtemaatmetsiftt |
| | | eyqsggpGPAGLYAQpgsEVQLVESGGGLVQPGNSLRLSCAASGFTFSKFGMSWV |
| | | RQAPGKGLEWVSSISGSGRDTLYAESVKGRFTISRDNAKTTLYLQMNSLRPED |
| | | TAVYYCTIGGSLSVSSQGTLVTVSSggggsggggsggggsggggsggggsggggssggpGPAG |
| | | LYAQpgsevqllesggglvqpggslrlscaasgsifsanamgwyrqapgkglelvavissggstnyadsvkgrftisr |
| | | dnskntvylqmnslraedtavyycmysgsyyytpndywgqgtlvtvss** |
| 317 | ACP398 | aptssstkktqlqlehllldlqmilnginnyknpkltrmltfklympkkatelkhlqcleeelkpleevlnlaqsknfhlrpr |
| | (WW0540) | dlisninvivlelkgsettfmceyadetativeflnrwitfcqsiistltsggpGPAGLYAQpgsggggsggggsggg |
| | | gsggggsggggsggggselcdddppeiphatfkamaykegtmlnceckrgfrriksgslymlctgnsshsswdnqc |
| | | qctssatnittkqvtpqpeeqkerkttemqspmqpvdqaslpghcrepppweneateriyhlvvgqmvyyqcvqgy |
| | | ralhrgpaesvckmthgktrwtqpqlictgemetsqfpgeekpqaspegrpesetsSlvtttdfqiqtemaatmetsiftt |
| | | eyqsggpGPAGLYAQpgsEVQLVESGGGLVQPGNSLRLSCAASGFTFSKFGMSWV |
| | | RQAPGKGLEWVSSISGSGRDTLYAESVKGRFTISRDNAKTTLYLQMNSLRPED |
| | | TAVYYCTIGGSLSVSSQGTLVTVSSggggsggggsggggsggggsggggsggggssggpGPAG |
| | | LYAQpgsEVQLVESGGGLVQPGGSLRLSCAASGFTFSSYTLAWVRQAPGKGLE |
| | | WVAAIDSSSYTYSPDTVRGRFTISRDNAKNSLYLQMNSLRAEDTAVYYCARD |
| | | SNWDALDYWGQGTTVTVSSastkgpsvfplapsskstsggtaalgclvkdyfpepvtvswnsgaltsgv |
| | | htfpavlqssglyslssvvtvpssslgtqtyicnvnhkpsntkvdkrvepksc** |
| 318 | ACP399 | EVQLVESGGGLVQPGGSLRLSCAASGFTFSSYTLAWVRQAPGKcLEWVAAIDS |
| | | SSYTYSPDTVRGRFTISRDNAKNSLYLQMNSLRAEDTAVYYCARDSNWDALD |
| | | YWGQGTTVTVSSGGGGSGGGGSGGGGSDIQMTQSPSSLSASVGDRVTITCKA |
| | | REKLWSAVAWYQQKPGKAPKsLIYSASFRYSGVPSRFSGSGSGTDFTLTISSLQ |
| | | PEDFATYYCQQYYTYPYTFGcGTKVEIKsggpGPAGLYAQpgsggggsggggsggggsg |
| | | gggsggggsggggsEVQLVESGGGLVQPGNSLRLSCAASGFTFSKFGMSWVRQAPG |
| | | KGLEWVSSISGSGRDTLYAESVKGRFTISRDNAKTTLYLQMNSLRPEDTAVYY |
| | | CTIGGSLSVSSQGTLVTVSSsggpGPAGLYAQpgstfkfympkkatelkhlqcleeelkpleevlnl |
| | | aqsknfhlrprdlisninvivlelkgsettfmceyadetativeflnrwitfcqsiistltGGssstkktqlqlehllldlqmi |
| | | lnginnyknpkltrmlsggpGPAGLYAQpgsEVQLVESGGGLVQPGNSLRLSCAASGFTFS |
| | | KFGMSWVRQAPGKGLEWVSSISGSGRDTLYAESVKGRFTISRDNAKTTLYLQ |
| | | MNSLRPEDTAVYYCTIGGSLSVSSQGTLVTVSS** |
| 319 | ACP400 | EVQLVESGGGLVQPGGSLRLSCAASGFTFSSYTLAWVRQAPGKGLEWVAAID |
| | | SSSYTYSPDTVRGRFTISRDNAKNSLYLQMNSLRAEDTAVYYCARDSNWDAL |
| | | DYWGcGTTVTVSSGGGGSGGGGSGGGGSDIQMTQSPSSLSASVGDRVTITCKA |
| | | REKLWSAVAWYQQKPGKcPKALIYSASFRYSGVPSRFSGSGSGTDFTLTISSLQ |
| | | PEDFATYYCQQYYTYPYTFGGGTKVEIKsggpGPAGLYAQpgsggggsggggsggggsg |
| | | gggsggggsggggsEVQLVESGGGLVQPGNSLRLSCAASGFTFSKFGMSWVRQAPG |
| | | KGLEWVSSISGSGRDTLYAESVKGRFTISRDNAKTTLYLQMNSLRPEDTAVYY |
| | | CTIGGSLSVSSQGTLVTVSSsggpGPAGLYAQpgstfkfympkkatelkhlqcleeelkpleevlnl |
| | | aqsknfhlrprdlisninvivlelkgsettfmceyadetativeflnrwitfcqsiistltGGssstkktqlqlehllldlqmi |
| | | lnginnyknpkltrmlsggpGPAGLYAQpgsEVQLVESGGGLVQPGNSLRLSCAASGFTFS |
| | | KFGMSWVRQAPGKGLEWVSSISGSGRDTLYAESVKGRFTISRDNAKTTLYLQ |
| | | MNSLRPEDTAVYYCTIGGSLSVSSQGTLVTVSS** |
| 320 | ACP401 | EVQLVESGGGLVQPGGSLRLSCAASGFTFSSYTLAWVRQAPGKcLEWVAAIDS |
| | | SSYTYSPDTVRGRFTISRDNAKNSLYLQMNSLRAEDTAVYYCARDSNWDALD |
| | | YWGQGTTVTVSSGGGGSGGGGSGGGGSDIQMTQSPSSLSASVGDRVTITCKV |
| | | TEKVWGNVAWYQQKPGKAPISLIYSPSLRKSGVPSRFSGSGSGTDFTLTISSLQ |
| | | PEDFATYYCQQYYTYPYIFGcGTKVEIKsggpGPAGLYAQpgsggggsggggsggggsg |
| | | gggsggggsggggsEVQLVESGGGLVQPGNSLRLSCAASGFTFSKFGMSWVRQAPG |
| | | KGLEWVSSISGSGRDTLYAESVKGRFTISRDNAKTTLYLQMNSLRPEDTAVYY |
| | | CTIGGSLSVSSQGTLVTVSSsggpGPAGLYAQpgstfkfympkkatelkhlqcleeelkpleevlnl |
| | | aqsknfhlrprdlisninvivlelkgsettfmceyadetativeflnrwitfcqsiistltGGssstkktqlqlehllldlqmi |
| | | lnginnyknpkltrmlsggpGPAGLYAQpgsEVQLVESGGGLVQPGNSLRLSCAASGFTFS |
| | | KFGMSWVRQAPGKGLEWVSSISGSGRDTLYAESVKGRFTISRDNAKTTLYLQ |
| | | MNSLRPEDTAVYYCTIGGSLSVSSQGTLVTVSS** |
| 321 | ACP402 | EVQLVESGGGLVQPGGSLRLSCAASGFTFSSYTLAWVRQAPGKGLEWVAAID |
| | | SSSYTYSPDTVRGRFTISRDNAKNSLYLQMNSLRAEDTAVYYCARDSNWDAL |
| | | DYWGcGTTVTVSSGGGGSGGGGSGGGGSDIQMTQSPSSLSASVGDRVTITCKV |
| | | TEKVWGNVAWYQQKPGKcPISLIYSPSLRKSGVPSRFSGSGSGTDFTLTISSLQP |
| | | EDFATYYCQQYYTYPYTFGGGTKVEIKsggpGPAGLYAQpgsggggsggggsggggsgg |
| | | ggsggggsggggsEVQLVESGGGLVQPGNSLRLSCAASGFTFSKFGMSWVRQAPGK |
| | | GLEWVSSISGSGRDTLYAESVKGRFTISRDNAKTTLYLQMNSLRPEDTAVYYC |
| | | TIGGSLSVSSQGTLVTVSSsggpGPAGLYAQpgstfkfympkkatelkhlqcleeelkpleevlnla |
| | | qsknfhlrprdlisninvivlelkgsettfmceyadetativeflnrwitfcqsiistltGGssstkktqlqlehllldlqmi |
| | | lnginnyknpkltrmlsggpGPAGLYAQpgsEVQLVESGGGLVQPGNSLRLSCAASGFTFS |
| | | KFGMSWVRQAPGKGLEWVSSISGSGRDTLYAESVKGRFTISRDNAKTTLYLQ |
| | | MNSLRPEDTAVYYCTIGGSLSVSSQGTLVTVSS** |
| 322 | ACP403 | evqllesggglvqpggslrlscaasgsifsanamgwyrqapgkqrelvavissggstnyadsvkgrftisrdnskntvyl |
| | | qmnslraedtavyycmysgsyyytpndywgqgtlvtvsssggpGPAGLYAQpgsggggsggggsggggsg |
| | | gggsggggsggggsEVQLVESGGGLVQPGNSLRLSCAASGFTFSKFGMSWVRQAPG |
| | | KGLEWVSSISGSGRDTLYAESVKGRFTISRDNAKTTLYLQMNSLRPEDTAVYY |
| | | CTIGGSLSVSSQGTLVTVSSsggpGPAGLYAQpgstfkfympkkatelkhlqcleeelkpleevlnl |
| | | aqsknfhlrprdlisninvivlelkgsettfmceyadetativeflnrwitfcqsiistltGGssstkktqlqlehllldlqmi |
| | | lnginnyknpkltrmlsggpGPAGLYAQpgsEVQLVESGGGLVQPGNSLRLSCAASGFTFS |
| | | KFGMSWVRQAPGKGLEWVSSISGSGRDTLYAESVKGRFTISRDNAKTTLYLQ |
| | | MNSLRPEDTAVYYCTIGGSLSVSSQGTLVTVSS** |
| 323 | ACP404 | evqllesggglvqpggslrlscaasgsifsanamgwyrqapgkglelvavissggstnyadsvkgrftisrdnskntvyl |
| | | qmnslraedtavyycmysgsyyytpndywgqgtlvtvsssggpGPAGLYAQpgsggggsggggsggggsg |
| | | gggsggggsggggsEVQLVESGGGLVQPGNSLRLSCAASGFTFSKFGMSWVRQAPG |
| | | KGLEWVSSISGSGRDTLYAESVKGRFTISRDNAKTTLYLQMNSLRPEDTAVYY |
| | | CTIGGSLSVSSQGTLVTVSSsggpGPAGLYAQpgstfkfympkkatelkhlqcleeelkpleevlnl |
| | | aqsknfhlrprdlisninvivlelkgsettfmceyadetativeflnrwitfcqsiistltGGssstkktqlqlehllldlqmi |
| | | lnginnyknpkltrmlsggpGPAGLYAQpgsEVQLVESGGGLVQPGNSLRLSCAASGFTFS |
| | | KFGMSWVRQAPGKGLEWVSSISGSGRDTLYAESVKGRFTISRDNAKTTLYLQ |
| | | MNSLRPEDTAVYYCTIGGSLSVSSQGTLVTVSS** |
| 324 | ACP405 | EVQLVESGGGLVQPGGSLRLSCAASGFTFSSYTLAWVRQAPGKGLEWVAAID |
| | | SSSYTYSPDTVRGRFTISRDNAKNSLYLQMNSLRAEDTAVYYCARDSNWDAL |
| | | DYWGQGTTVTVSSastkgpsvfplapsskstsggtaalgclvkdyfpepvtvswnsgaltsgvhtfpavlqss |
| | | glyslssvvtvpssslgtqtyicnvnhkpsntkvdkrvepkscsggpGPAGLYAQpgsggggsggggsggggs |
| | | ggggsggggsggggsEVQLVESGGGLVQPGNSLRLSCAASGFTFSKFGMSWVRQAP |
| | | GKGLEWVSSISGSGRDTLYAESVKGRFTISRDNAKTTLYLQMNSLRPEDTAVY |
| | | YCTIGGSLSVSSQGTLVTVSSsggpGPAGLYAQpgstfkfympkkatelkhlqcleeelkpleevl |
| | | nlaqsknfhlrprdlisninvivlelkgsettfmceyadetativeflnrwitfcqsiistltGGssstkktqlqlehllldlq |
| | | milnginnyknpkltrmlsggpGPAGLYAQpgsEVQLVESGGGLVQPGNSLRLSCAASGFTF |
| | | SKFGMSWVRQAPGKGLEWVSSISGSGRDTLYAESVKGRFTISRDNAKTTLYL |
| | | QMNSLRPEDTAVYYCTIGGSLSVSSQGTLVTVSS** |
| 325 | ACP406 | vprdcgckpcictvpevssvfifppkpkdvltitltpkvtcvvvdiskddpevqfswfvddvevhtaqtqpreeqfnstf |
| | (WW0548) | rsvselpimhqdwlngkefkcrvnsaafpapiektisktkgrpkapqvytipppkeqmakdkvsltcmitdffpeditv |
| | | ewqwngqpaenykntqpimdtdgsyfvysklnvqksnweagntftcsvlheglhnhhtekslshspgksggpGP |
| | | AGLYAQpgsaptssstkktqlqlehllldlqmilnginnyknpkltrmltfkfympkkatelkhlqcleeelkpleev |
| | | lnlaqsknfhirprdlisninvivlelkgsettfmceyadetativeflnrwitfcqsiistltggggsggggsggggsggggs |
| | | ggggsggggssggpGPAGLYAQpgsEVQLVESGGGLVQPGGSLRLSCAASGFTFSSYT |
| | | LAWVRQAPGKGLEWVAAIDSSSYTYSPDTVRGRFTISRDNAKNSLYLQMNSL |
| | | RAEDTAVYYCARDSNWDALDYWGQGTTVTVSSastkgpsvfplapsskstsggtaalgclvk |
| | | dyfpepvtvswnsgaltsgvhtfpavlqssglyslssvvtvpssslgtqtyicnvnhkpsntkvdkrvepksc** |
| 326 | ACP407 | vprdcgckpcictvpevssvfifppkpkdvltitltpkvtcvvvdiskddpevqfswfvddvevhtaqtqpreeqfnstf |
| | (WW0549) | rsvselpimhqdwlngkefkcrvnsaafpapiektisktkgrpkapqvytipppkeqmakdkvsltcmitdffpeditv |
| | | ewqwngqpaenykntqpimdtdgsyfvysklnvqksnweagntftcsvlheglhnhhtekslshspgksggpGP |
| | | AGLYAQpgsaptssstkktqlqlehllldlqmilnginnyknpkltrmltfkfympkkatelkhlqcleeelkpleev |
| | | lnlaqsknfhlrprdlisninvivlelkgsettfmceyadetativeflnrwitfcqsiistltggggsggggsggggsggggs |
| | | ggggsggggssggpGPAGLYAQpgsEVQLVESGGGLVQPGGSLRLSCAASGFTFSSYT |
| | | LAWVRQAPGKcLEWVAAIDSSSYTYSPDTVRGRFTISRDNAKNSLYLQMNSLR |
| | | AEDTAVYYCARDSNWDALDYWGQGTTVTVSSGGGGSGGGGSGGGGSDIQM |
| | | TQSPSSLSASVGDRVTITCKAREKLWSAVAWYQQKPGKAPKALIYSASFRYSG |
| | | VPSRFSGSGSGTDFTLTISSLQPEDFATYYCQQYYTYPYTFGcGTKVEIK** |
| 327 | ACP408 | vprdcgckpcictvpevssvfifppkpkdvltitltpkvtcvvvdiskddpevqfswfvddvevhtaqtqpreeqfnstf |
| | (WW0550) | rsvselpimhqdwlngkefkcrvnsaafpapiektisktkgrpkapqvytipppkeqmakdkvsltcmitdffpeditv |
| | | ewqwngqpaenykntqpimdtdgsyfvysklnvqksnweagntftcsvlheglhnhltekslshspgksggpGP |
| | | AGLYAQpgsaptssstkktqlqlehllldlqmilnginnyknpkltrmltfkfympkkatelkhlqcleeelkpleev |
| | | lnlaqsknfhlrprdlisninvivlelkgsettfmceyadetativeflnrwitfcqsiistltggggsggggsggggsggggs |
| | | ggggsggggssggpGPAGLYAQpgsEVQLVESGGGLVQPGGSLRLSCAASGFTFSSYT |
| | | LAWVRQAPGKcLEWVAAIDSSSYTYSPDTVRGRFTISRDNAKNSLYLQMNSLR |
| | | AEDTAVYYCARDSNWDALDYWGQGTTVTVSSGGGGSGGGGSGGGGSDIQM |
| | | TQSPSSLSASVGDRVTITCKAREKLWSAVAWYQQKPGKAPKsLIYSASFRYSG |
| | | VPSRFSGSGSGTDFTLTISSLQPEDFATYYCQQYYTYPYTFGcGTKVEIK** |
| 328 | ACP409 | vprdcgckpcictvpevssvfifppkpkdvltitltpkvtcvvvdiskddpevqfswfvddvevhtaqtqpreeqfnstf |
| | (WW0551) | rsvselpimhqdwlngkefkcrvnsaafpapiektisktkgrpkapqvytipppkeqmakdkvsltcmitdffpeditv |
| | | ewqwngqpaenykntqpimdtdgsyfvysklnvqksnweagntftcsvlheglhnhltekslshspgksggpGP |
| | | AGLYAQpgsaptssstkktqlqlehllldlqmilnginnyknpkltrmltfkfympkkatelkhlqcleeelkpleev |
| | | lnlaqsknfhlrprdlisninvivlelkgsettfmceyadetativeflnrwitfcqsiistltggggsggggsggggsggggs |
| | | ggggsggggssggpGPAGLYAQpgsEVQLVESGGGLVQPGGSLRLSCAASGFTFSSYT |
| | | LAWVRQAPGKGLEWVAAIDSSSYTYSPDTVRGRFTISRDNAKNSLYLQMNSL |
| | | RAEDTAVYYCARDSNWDALDYWGcGTTVTVSSGGGGSGGGGSGGGGSDIQ |
| | | MTQSPSSLSASVGDRVTITCKAREKLWSAVAWYQQKPGKcPKALIYSASFRYS |
| | | GVPSRFSGSGSGTDFTLTISSLQPEDFATYYCQQYYTYPYTFGGGTKVEIK** |
| 329 | ACP410 | vprdcgckpcictvpevssvfifppkpkdvltitltpkvtcvvvdiskddpevqfswfvddvevhtaqtqpreeqfnstf |
| | (WW0552) | rsvselpimhqdwlngkefkcrvnsaafpapiektisktkgrpkapqvytipppkeqmakdkvsltcmitdffpeditv |
| | | ewqwngqpaenykntqpimdtdgsyfvysklnvqksnweagntftcsvlheglhnhltekslshspgksggpGP |
| | | AGLYAQpgsaptssstkktqlqlehllldlqmilnginnyknpkltrmltfkfympkkatelkhlqcleeelkpleev |
| | | lnlaqsknfhlrprdlisninvivlelkgsettfmceyadetativeflnrwitfcqsiistltggggsggggsggggsggggs |
| | | ggggsggggssggpGPAGLYAQpgsEVQLVESGGGLVQPGGSLRLSCAASGFTFSSYT |
| | | LAWVRQAPGKcLEWVAAIDSSSYTYSPDTVRGRFTISRDNAKNSLYLQMNSLR |
| | | AEDTAVYYCARDSNWDALDYWGQGTTVTVSSGGGGSGGGGSGGGGSDIQM |
| | | TQSPSSLSASVGDRVTITCKVTEKVWGNVAWYQQKPGKAPISLIYSPSLRKSG |
| | | VPSRFSGSGSGTDFTLTISSLQPEDFATYYCQQYYTYPYTFGcGTKVEIK** |
| 330 | ACP411 | vprdcgckpcictvpevssvfifppkpkdvltitltpkvtcvvvdiskddpevqfswfvddvevhtaqtqpreeqfnstf |
| | (WW0553) | rsvselpimhqdwlngkefkcrvnsaafpapiektisktkgrpkapqvytipppkeqmakdkvsltcmitdffpeditv |
| | | ewqwngqpaenykntqpimdtdgsyfvysklnvqksnweagntftcsvlheglhnhltekslshspgksggpGP |
| | | AGLYAQpgsaptssstkktqlqlehllldlqmilnginnyknpkltrmltfkfympkkatelkhlqcleeelkpleev |
| | | lnlaqsknfhlrprdlisninvivlelkgsettfmceyadetativeflnrwitfcqsiistltggggsggggsggggsggggs |
| | | ggggsggggssggpGPAGLYAQpgsEVQLVESGGGLVQPGGSLRLSCAASGFTFSSYT |
| | | LAWVRQAPGKGLEWVAAIDSSSYTYSPDTVRGRFTISRDNAKNSLYLQMNSL |
| | | RAEDTAVYYCARDSNWDALDYWGcGTTVTVSSGGGGSGGGGSGGGGSDIQ |
| | | MTQSPSSLSASVGDRVTITCKVTEKVWGNVAWYQQKPGKcPISLIYSPSLRKS |
| | | GVPSRFSGSGSGTDFTLTISSLQPEDFATYYCQQYYTYPYTFGGGTKVEIK** |
| 331 | ACP412 | vprdcgckpcictvpevssvfifppkpkdvltitltpkvtcvvvdiskddpevqfswfvddvevhtaqtqpreeqfnstf |
| | (WW0554) | rsvselpimhqdwlngkefkcrvnsaafpapiektisktkgrpkapqvytipppkeqmakdkvsltcmitdffpeditv |
| | | ewqwngqpaenykntqpimdtdgsyfvysklnvqksnweagntftcsvlheglhnhltekslshspgksggpGP |
| | | AGLYAQpgsaptssstkktqlqlehllldlqmilnginnyknpkltrmltfkfympkkatelkhlqcleeelkpleev |
| | | lnlaqsknfhlrprdlisninvivlelkgsettfmceyadetativeflnrwitfcqsiistltggggsggggsggggsggggs |
| | | ggggsggggssggpGPAGLYAQpgsevqllesggglvqpggslrlscaasgsifsanamgwyrqapgkqrelv |
| | | avissggstnyadsvkgrftisrdnskntvylqmnslraedtavyycmysgsyyytpndywgqgtlvtvss** |
| 332 | ACP413 | elcdddppeiphatfkamaykegtmlnceckrgfrriksgslymlctgnsshsswdnqcqctssatrnttkqvtpqpee |
| | (WW0555) | qkerkttemqspmqpvdqaslpghcrepppweneateriylrfwgqmvyyqcvqgyralhrgpaesvckmthgk |
| | | trwtqpqlictgemetsqfpgeekpqaspegrpesetsSlvtttdfqiqtemaatmetsiftteyqggggsggggsgggg |
| | | sggggsggggsggggsDIQMTQSPSSLSASVGDRVTITCKAREKLWSAVAWYQQKPG |
| | | KAPKsLIYSASFRYSGVPSRFSGSGSGTDFTLTISSLQPEDFATYYCQQYYTYPY |
| | | TFGGGTKVEIKrtvaapsvfifppsdeqlksgtasvvcllnnfypreakvqwkvdnalqsgnsqesvteqdskd |
| | | styslsstltlskadyekhkvyacevthqglsspvtksfnrgec** |
| 333 | ACP414 | elcdddppeiphatfkamaykegtmlnceckrgfrriksgslymlctgnsshsswdnqcqctssatrnttkqvtpqpee |
| | (WW0556) | qkerkttemqspmqpvdqaslpghcrepppweneateriylrfwgqmvyyqcvqgyralhrgpaesvckmthgk |
| | | trwtqpqlictgemetsqfpgeekpqaspegrpesetsSlvtttdfqiqtemaatmetsiftteyqggggsggggsgggg |
| | | sggggsggggsggggsDIQMTQSPSSLSASVGDRVTITCKVTEKVWGNVAWYQQKP |
| | | GKAPISLIYSPSLRKSGVPSRFSGSGSGTDFTLTISSLQPEDFATYYCQQYYTYP |
| | | YTFGGGTKVEIKrtvaapsvfifppsdeqlksgtasvvcllnnfypreakvqwkvdnalqsgnsqesvteqds |
| | | kdstyslsstltlskadyekhkvyacevthqglsspvtksfnrgec** |
| 334 | ACP415 | aptssstkktqlqlehllldlqmilnginnyknpkltrmltfkfympkkatelkhlqcleeelkpleevlnlaqsknfhlrpr |
| | (WW0557) | dlisninvivlelkgsettfmceyadetativeflnrwitfcqsiistltsggpGPAGLYAQpgsggggsggggsggg |
| | | gsggggsggggsggggsEVQLVESGGGLVQPGGSLRLSCAASGFTFSSYTLAWVRQA |
| | | PGKcLEWVAAIDSSSYTYSPDTVRGRFTISRDNAKNSLYLQMNSLRAEDTAVY |
| | | YCARDSNWDALDYWGQGTTVTVSSGGGGSGGGGSGGGGSDIQMTQSPSSLS |
| | | ASVGDRVTITCKAREKLWSAVAWYQQKPGKAPKsLIYSASFRYSGVPSRFSGS |
| | | GSGTDFTLTISSLQPEDFATYYCQQYYTYPYTFGcGTKVEIKggggsggggsggggsgg |
| | | ggsggggsggggsggggsggggsggggselcdddppeiphatfkamaykegtmlnceckrgfrriksgslymlctg |
| | | nsshsswdnqcqctssatnittkqvtpqpeeqkerkttemqspmqpvdqaslpghcrepppweneateriyhfvvgq |
| | | mvyyqcvqgyralhrgpaesvckmthgktrwtqpqlictgemetsqfpgeekpqaspegrpesetsSlvtttdfqiqte |
| | | maatmetsiftteyqsggpGPAGLYAQpgsEVQLVESGGGLVQPGNSLRLSCAASGFTFS |
| | | KFGMSWVRQAPGKGLEWVSSISGSGRDTLYAESVKGRFTISRDNAKTTLYLQ |
| | | MNSLRPEDTAVYYCTIGGSLSVSSQGTLVTVSS** |
| 335 | ACP416 | aptssstkktqlqlehllldlqmilnginnyknpkltrmltfkfympkkatelkhlqcleeelkpleevlnlaqsknfhlrpr |
| | (WW0558) | dlisninvivlelkgsettfmceyadetativeflnrwitfcqsiistltsggpGPAGLYAQpgsggggsggggsggg |
| | | gsggggsggggsggggsEVQLVESGGGLVQPGGSLRLSCAASGFTFSSYTLAWVRQA |
| | | PGKGLEWVAAIDSSSYTYSPDTVRGRFTISRDNAKNSLYLQMNSLRAEDTAVY |
| | | YCARDSNWDALDYWGcGTTVTVSSGGGGSGGGGSGGGGSDIQMTQSPSSLSA |
| | | SVGDRVTITCKAREKLWSAVAWYQQKPGKcPKALIYSASFRYSGVPSRFSGSG |
| | | SGTDFTLTISSLQPEDFATYYCQQYYTYPYTFGGGTKVEIKggggsggggsggggsggg |
| | | gsggggsggggsggggsggggsggggselcdddppeiphatfkamaykegtmlnceckrgfrriksgslymlctgns |
| | | shsswdnqcqctssatrnttkqvtpqpeeqkerkttemqspmqpvdqaslpghcrepppweneateriyhfvvgqm |
| | | vyyqcvqgyralhrgpaesvckmthgktrwtqpqlictgemetsqfpgeekpqaspegrpesetsSlvtttdfqiqtem |
| | | aatmetsiftteyqsggpGPAGLYAQpgsEVQLVESGGGLVQPGNSLRLSCAASGFTFSK |
| | | FGMSWVRQAPGKGLEWVSSISGSGRDTLYAESVKGRFTISRDNAKTTLYLQM |
| | | NSLRPEDTAVYYCTIGGSLSVSSQGTLVTVSS** |
| 336 | ACP417 | aptssstkktqlqlehllldlqmilnginnyknpkltrmltfkfympkkatelkhlqcleeelkpleevlnlaqsknfhlrpr |
| | (WW0559) | dlisninvivlelkgsettfmceyadetativeflnrwitfcqsiistltsggpGPAGLYAQpgsggggsggggsggg |
| | | gsggggsggggsggggsEVQLVESGGGLVQPGGSLRLSCAASGFTFSSYTLAWVRQA |
| | | PGKcLEWVAAIDSSSYTYSPDTVRGRFTISRDNAKNSLYLQMNSLRAEDTAVY |
| | | YCARDSNWDALDYWGQGTTVTVSSGGGGSGGGGSGGGGSDIQMTQSPSSLS |
| | | ASVGDRVTITCKVTEKVWGNVAWYQQKPGKAPISLIYSPSLRKSGVPSRFSGS |
| | | GSGTDFTLTISSLQPEDFATYYCQQYYTYPYTFGcGTKVEIKggggsggggsggggsgg |
| | | ggsggggsggggsggggsggggsggggselcdddppeiphatfkamaykegtmlnceckrgfrriksgslymlctg |
| | | nsshsswdnqcqctssatnittkqvtpqpeeqkerkttemqspmqpvdqaslpghcrepppweneateriyhfvvgq |
| | | mvyyqcvqgyralhrgpaesvckmthgktrwtqpqlictgemetsqfpgeekpqaspegrpesetsSlvtttdfqiqte |
| | | maatmetsiftteyqsggpGPAGLYAQpgsEVQLVESGGGLVQPGNSLRLSCAASGFTFS |
| | | KFGMSWVRQAPGKGLEWVSSISGSGRDTLYAESVKGRFTISRDNAKTTLYLQ |
| | | MNSLRPEDTAVYYCTIGGSLSVSSQGTLVTVSS** |
| 337 | ACP418 | aptssstkktqlqlehllldlqmilnginnyknpkltrmltfkfympkkatelkhlqcleeelkpleevlnlaqsknfhlrpr |
| | (WW0560) | dlisninvivlelkgsettfmceyadetativeflnrwitfcqsiistltsggpGPAGLYAQpgsggggsggggsggg |
| | | gsggggsggggsggggsEVQLVESGGGLVQPGGSLRLSCAASGFTFSSYTLAWVRQA |
| | | PGKGLEWVAAIDSSSYTYSPDTVRGRFTISRDNAKNSLYLQMNSLRAEDTAVY |
| | | YCARDSNWDALDYWGcGTTVTVSSGGGGSGGGGSGGGGSDIQMTQSPSSLSA |
| | | SVGDRVTITCKVTEKVWGNVAWYQQKPGKcPISLIYSPSLRKSGVPSRFSGSGS |
| | | GTDFTLTISSLQPEDFATYYCQQYYTYPYTFGGGTKVEIKggggsggggsggggsgggg |
| | | sggggsggggsggggsggggsggggselcdddppeiphatfkamaykegtmlnceckrgfrriksgslymlctgnss |
| | | hsswdnqcqctssatrnttkqvtpqpeeqkerkttemqspmqpvdqaslpghcrepppweneateriyhfvvgqmv |
| | | yyqcvqgyralhrgpaesvckmthgktrwtqpqlictgemetsqfpgeekpqaspegrpesetsSlvtttdfqiqtema |
| | | atmetsiftteyqsggpGPAGLYAQpgsEVQLVESGGGLVQPGNSLRLSCAASGFTFSKF |
| | | GMSWVRQAPGKGLEWVSSISGSGRDTLYAESVKGRFTISRDNAKTTLYLQMN |
| | | SLRPEDTAVYYCTIGGSLSVSSQGTLVTVSS** |
| 338 | ACP419 | aptssstkktqlqlehllldlqmilnginnyknpkltrmltfkfympkkatelkhlqcleeelkpleevlnlaqsknfhlrpr |
| | (WW0561) | dlisninvivlelkgsettfmceyadetativeflnrwitfcqsiistltsggpGPAGLYAQpgsggggsggggsggg |
| | | gsggggsggggsggggsevqllesggglvqpggslrlscaasgsifsanamgwyrqapgkqrelvavissggstnyad |
| | | svkgrftisrdnskntvylqmnslraedtavyycmysgsyyytpndywgqgtlvtvssggggsggggsggggsggg |
| | | gsggggsggggsggggsggggsggggselcdddppeiphatfkamaykegtmlnceckrgfrriksgslymlctgns |
| | | shsswdnqcqctssatrnttkqvtpqpeeqkerkttemqspmqpvdqaslpghcrepppweneateriyhfvvgqm |
| | | vyyqcvqgyralhrgpaesvckmthgktrwtqpqlictgemetsqfpgeekpqaspegrpesetsSlvtttdfqiqtem |
| | | aatmetsiftteyqsggpGPAGLYAQpgsEVQLVESGGGLVQPGNSLRLSCAASGFTFSK |
| | | FGMSWVRQAPGKGLEWVSSISGSGRDTLYAESVKGRFTISRDNAKTTLYLQM |
| | | NSLRPEDTAVYYCTIGGSLSVSSQGTLVTVSS** |
| 339 | ACP420 | aptssstkktqlqlehllldlqmilnginnyknpkltrmltfkfympkkatelkhlqcleeelkpleevlnlaqsknfhlrpr |
| | (WW0562) | dlisninvivlelkgsettfmceyadetativeflnrwitfcqsiistltsggpGPAGLYAQpgsggggsggggsggg |
| | | gsggggsggggsggggsevqllesggglvqpggslrlscaasgsifsanamgwyrqapgkglelvavissggstnyad |
| | | svkgrftisrdnskntvylqmnslraedtavyycmysgsyyytpndywgqgtlvtvssggggsggggsggggsggg |
| | | gsggggsggggsggggsggggsggggselcdddppeiphatfkamaykegtmlnceckrgfrriksgslymlctgns |
| | | shsswdnqcqctssatrnttkqvtpqpeeqkerkttemqspmqpvdqaslpghcrepppweneateriyhfvvgqm |
| | | vyyqcvqgyralhrgpaesvckmthgktrwtqpqlictgemetsqfpgeekpqaspegrpesetsSlvtttdfqiqtem |
| | | aatmetsiftteyqsggpGPAGLYAQpgsEVQLVESGGGLVQPGNSLRLSCAASGFTFSK |
| | | FGMSWVRQAPGKGLEWVSSISGSGRDTLYAESVKGRFTISRDNAKTTLYLQM |
| | | NSLRPEDTAVYYCTIGGSLSVSSQGTLVTVSS** |
| 340 | ACP421 | EVQLVESGGGLVQPGNSLRLSCAASGFTFSKFGMSWVRQAPGKGLEWVSSIS |
| | (WW0563) | GSGRDTLYAESVKGRFTISRDNAKTTLYLQMNSLRPEDTAVYYCTIGGSLSVS |
| | | SQGTLVTVSSsggpGPAGLYAQpgsEVQLVESGGGLVQPGGSLRLSCAASGFTFS |
| | | SYTLAWVRQAPGKcLEWVAAIDSSSYTYSPDTVRGRFTISRDNAKNSLYLQM |
| | | NSLRAEDTAVYYCARDSNWDALDYWGQGTTVTVSSGGGGSGGGGSGGGGS |
| | | DIQMTQSPSSLSASVGDRVTITCKAREKLWSAVAWYQQKPGKAPKsLIYSASF |
| | | RYSGVPSRFSGSGSGTDFTLTISSLQPEDFATYYCQQYYTYPYTFGcGTKVEIKg |
| | | gggsggggsggggsggggsggggsggggsggggsggggsggggselcdddppeiphatfkamaykegtmlncec |
| | | krgfrriksgslymlctgnsshsswdnqcqctssatnittkqvtpqpeeqkerkttemqspmqpvdqaslpghcrepp |
| | | pweneateriylrfwgqmvyyqcvqgyralhrgpaesvckmthgktrwtqpqlictgemetsqfpgeekpqaspeg |
| | | rpesetsSlvtttdfqiqtemaatmetsiftteyqggggsggggsggggsggggsggggsggggssggpGPAGLY |
| | | AQpgsaptssstkktqlqlehllldlqmilnginnyknpkltrmltfkfympkkatelkhlqcleeelkpleevlnlaqsk |
| | | nfhlrprdlisninvivlelkgsettfmceyadetativefinrwitfcqsiistlt** |
| 341 | ACP422 | EVQLVESGGGLVQPGNSLRLSCAASGFTFSKFGMSWVRQAPGKGLEWVSSIS |
| | (WW0564) | GSGRDTLYAESVKGRFTISRDNAKTTLYLQMNSLRPEDTAVYYCTIGGSLSVS |
| | | SQGTLVTVSSsggpGPAGLYAQpgsEVQLVESGGGLVQPGGSLRLSCAASGFTFS |
| | | SYTLAWVRQAPGKGLEWVAAIDSSSYTYSPDTVRGRFTISRDNAKNSLYLQM |
| | | NSLRAEDTAVYYCARDSNWDALDYWGcGTTVTVSSGGGGSGGGGSGGGGSD |
| | | IQMTQSPSSLSASVGDRVTITCKAREKLWSAVAWYQQKPGKcPKALIYSASFR |
| | | YSGVPSRFSGSGSGTDFTLTISSLQPEDFATYYCQQYYTYPYTFGGGTKVEIKgg |
| | | ggsggggsggggsggggsggggsggggsggggsggggsggggselcdddppeiphatfkamaykegtmlnceck |
| | | rgfrriksgslymlctgnsshsswdnqcqctssatrnttkqvtpqpeeqkerkttemqspmqpvdqaslpghcreppp |
| | | weneateriyhfvvgqmvyyqcvqgyralhrgpaesvckmthgktrwtqpqlictgemetsqfpgeekpqaspegr |
| | | pesetsSlvtttdfqiqtemaatmetsiftteyqggggsggggsggggsggggsggggsggggssggpGPAGLYA |
| | | Qpgsaptssstkktqlqlehllldlqmilnginnyknpkltrmltfkfympkkatelkhlqcleeelkpleevlnlaqsknf |
| | | hlrprdlisninvivlelkgsettfmceyadetativeflnrwitfcqsiistlt** |
| 342 | ACP423 | EVQLVESGGGLVQPGNSLRLSCAASGFTFSKFGMSWVRQAPGKGLEWVSSIS |
| | (WW0565) | GSGRDTLYAESVKGRFTISRDNAKTTLYLQMNSLRPEDTAVYYCTIGGSLSVS |
| | | SQGTLVTVSSsggpGPAGLYAQpgsEVQLVESGGGLVQPGGSLRLSCAASGFTFS |
| | | SYTLAWVRQAPGKcLEWVAAIDSSSYTYSPDTVRGRFTISRDNAKNSLYLQM |
| | | NSLRAEDTAVYYCARDSNWDALDYWGQGTTVTVSSGGGGSGGGGSGGGGS |
| | | DIQMTQSPSSLSASVGDRVTITCKVTEKVWGNVAWYQQKPGKAPISLIYSPSL |
| | | RKSGVPSRFSGSGSGTDFTLTISSLQPEDFATYYCQQYYTYPYTFGcGTKVEIKg |
| | | gggsggggsggggsggggsggggsggggsggggsggggsggggselcdddppeiphatfkamaykegtmlncec |
| | | krgfrriksgslymlctgnsshsswdnqcqctssatrnttkqvtpqpeeqkerkttemqspmqpvdqaslpghcrepp |
| | | pweneateriylrfwgqmvyyqcvqgyralhrgpaesvckmthgktrwtqpqlictgemetsqfpgeekpqaspeg |
| | | rpesetsSlvtttdfqiqtemaatmetsiftteyqggggsggggsggggsggggsggggsggggssggpGPAGLY |
| | | AQpgsaptssstkktqlqlehllldlqmilnginnyknpkltrmltfkfympkkatelkhlqcleeelkpleevlnlaqsk |
| | | nfhlrprdlisninvivlelkgsettfmceyadetativeflnrwitfcqsiistlt** |
| 343 | ACP424 | EVQLVESGGGLVQPGNSLRLSCAASGFTFSKFGMSWVRQAPGKGLEWVSSIS |
| | (WW0566) | GSGRDTLYAESVKGRFTISRDNAKTTLYLQMNSLRPEDTAVYYCTIGGSLSVS |
| | | SQGTLVTVSSsggpGPAGLYAQpgsEVQLVESGGGLVQPGGSLRLSCAASGFTFS |
| | | SYTLAWVRQAPGKGLEWVAAIDSSSYTYSPDTVRGRFTISRDNAKNSLYLQM |
| | | NSLRAEDTAVYYCARDSNWDALDYWGcGTTVTVSSGGGGSGGGGSGGGGSD |
| | | IQMTQSPSSLSASVGDRVTITCKVTEKVWGNVAWYQQKPGKcPISLIYSPSLRK |
| | | SGVPSRFSGSGSGTDFTLTISSLQPEDFATYYCQQYYTYPYTFGGGTKVEIKggg |
| | | gsggggsggggsggggsggggsggggsggggsggggsggggselcdddppeiphatfkamaykegtmlnceckr |
| | | gfrriksgslymlctgnsshsswdnqcqctssatrnttkqvtpqpeeqkerkttemqspmqpvdqaslpghcrepppw |
| | | eneateriyhfvvgqmvyyqcvqgyralhrgpaesvckmthgktrwtqpqlictgemetsqfpgeekpqaspegrpe |
| | | setsSlvtttdfqiqtemaatmetsiftteyqggggsggggsggggsggggsggggsggggssggpGPAGLYAQ |
| | | pgsaptssstkktqlqlehllldlqmilnginnyknpkltrmltfkfympkkatelkhlqcleeelkpleevlnlaqsknfh |
| | | lrprdlisninvivlelkgsettfmceyadetativeflnrwitfcqsiistlt** |
| 344 | ACP425 | EVQLVESGGGLVQPGNSLRLSCAASGFTFSKFGMSWVRQAPGKGLEWVSSIS |
| | (WW0567) | GSGRDTLYAESVKGRFTISRDNAKTTLYLQMNSLRPEDTAVYYCTIGGSLSVS |
| | | SQGTLVTVSSsggpGPAGLYAQpgsevqllesggglvqpggslrlscaasgsifsanamgwyrqapgkq |
| | | relvavissggstnyadsvkgrftisrdnskntvylqmnslraedtavyycmysgsyyytpndywgqgtlvtvssggg |
| | | gsggggsggggsggggsggggsggggsggggsggggsggggselcdddppeiphatfkamaykegtmlnceckr |
| | | gfrriksgslymlctgnsshsswdnqcqctssatnittkqvtpqpeeqkerkttemqspmqpvdqaslpghcrepppw |
| | | eneateriylrfwgqmvyyqcvqgyralhrgpaesvckmthgktrwtqpqlictgemetsqfpgeekpqaspegrpe |
| | | setsSlvtttdfqiqtemaatmetsiftteyqggggsggggsggggsggggsggggsggggssggpGPAGLYAQ |
| | | pgsaptssstkktqlqlehllldlqmilnginnyknpkltrmltfkfympkkatelkhlqcleeelkpleevlnlaqsknfh |
| | | lrprdlisninvivlelkgsettfmceyadetativeflnrwitfcqsiistlt** |
| 345 | ACP426 | EVQLVESGGGLVQPGNSLRLSCAASGFTFSKFGMSWVRQAPGKGLEWVSSIS |
| | (WW0568) | GSGRDTLYAESVKGRFTISRDNAKTTLYLQMNSLRPEDTAVYYCTIGGSLSVS |
| | | SQGTLVTVSSsggpGPAGLYAQpgsevqllesggglvqpggslrlscaasgsifsanamgwyrqapgkg |
| | | lelvavissggstnyadsvkgrftisrdnskntvylqmnslraedtavyycmysgsyyytpndywgqgtlvtvssgggg |
| | | sggggsggggsggggsggggsggggsggggsggggsggggselcdddppeiphatfkamaykegtmlnceckrgf |
| | | rriksgslymlctgnsshsswdnqcqctssatnittkqvtpqpeeqkerkttemqspmqpvdqaslpghcrepppwe |
| | | neateriylrfwgqmvyyqcvqgyralhrgpaesvckmthgktrwtqpqlictgemetsqfpgeekpqaspegrpes |
| | | etsSlvtttdfqiqtemaatmetsiftteyqggggsggggsggggsggggsggggsggggssggpGPAGLYAQp |
| | | gsaptssstkktqlqlehllldlqmilnginnyknpkltrmltfkfympkkatelkhlqcleeelkpleevlnlaqsknfhh |
| | | prdlisninvivlelkgsettfmceyadetativeflnrwitfcqsiistlt** |
| 346 | ACP427 | aptssstkktqlqlehllldlqmilnginnyknpkltrmltfkfympkkatelkhlqcleeelkpleevlnlaqskrtfhlrpr |
| | (WW0569) | dlisninvivlelkgsettfmceyadetativeflnrwitfcqsiistltsggpGPAGLYAQpgsEVQLVESGG |
| | | GLVQPGNSLRLSCAASGFTFSKFGMSWVRQAPGKGLEWVSSISGSGRDTLYA |
| | | ESVKGRFTISRDNAKTTLYLQMNSLRPEDTAVYYCTIGGSLSVSSQGTLVTVSS |
| | | ggggsggggsggggsggggsggggsggggssggpGPAGLYAQpgsEVQLVESGGGLVQPGGS |
| | | LRLSCAASGFTFSSYTLAWVRQAPGKcLEWVAAIDSSSYTYSPDTVRGRFTISR |
| | | DNAKNSLYLQMNSLRAEDTAVYYCARDSNWDALDYWGQGTTVTVSSGGGG |
| | | SGGGGSGGGGSDIQMTQSPSSLSASVGDRVTITCKAREKLWSAVAWYQQKPG |
| | | KAPKsLIYSASFRYSGVPSRFSGSGSGTDFTLTISSLQPEDFATYYCQQYYTYPY |
| | | TFGcGTKVEIKggggsggggsggggsggggsggggsggggsevqllesggglvqpggslrlscaasgsifsana |
| | | mgwyrqapgkqrelvavissggstnyadsvkgrftisrdnskntvylqnuislraedtavyycmysgsyyytpndyw |
| | | gqgtlvtvss** |
| 347 | ACP428 | aptssstkktqlqlehllldlqmilnginnyknpkltrmltfkfympkkatelkhlqcleeelkpleevlnlaqsknfhlrpr |
| | (WW0570) | dlisninvivlelkgsettfmceyadetativeflnrwitfcqsiistltsggpGPAGLYAQpgsEVQLVESGG |
| | | GLVQPGNSLRLSCAASGFTFSKFGMSWVRQAPGKGLEWVSSISGSGRDTLYA |
| | | ESVKGRFTISRDNAKTTLYLQMNSLRPEDTAVYYCTIGGSLSVSSQGTLVTVSS |
| | | ggggsggggsggggsggggsggggsggggssggpGPAGLYAQpgsEVQLVESGGGLVQPGGS |
| | | LRLSCAASGFTFSSYTLAWVRQAPGKGLEWVAAIDSSSYTYSPDTVRGRFTISR |
| | | DNAKNSLYLQMNSLRAEDTAVYYCARDSNWDALDYWGcGTTVTVSSGGGG |
| | | SGGGGSGGGGSDIQMTQSPSSLSASVGDRVTITCKAREKLWSAVAWYQQKPG |
| | | KcPKALIYSASFRYSGVPSRFSGSGSGTDFTLTISSLQPEDFATYYCQQYYTYPY |
| | | TFGGGTKVEIKggggsggggsggggsggggsggggsggggsevqllesggglvqpggslrlscaasgsifsan |
| | | amgwyrqapgkqrelvavissggstnyadsvkgrftisrdnskntvylqmnslraedtavyycmysgsyyytpndy |
| | | wgqgtlvtvss** |
| 348 | ACP429 | aptssstkktqlqlehllldlqmilnginnyknpkltrmltfkfympkkatelkhlqcleeelkpleevlnlaqsknfhlrpr |
| | (WW0571) | dlisninvivlelkgsettfmceyadetativeflnrwitfcqsiistltsggpGPAGLYAQpgsEVQLVESGG |
| | | GLVQPGNSLRLSCAASGFTFSKFGMSWVRQAPGKGLEWVSSISGSGRDTLYA |
| | | ESVKGRFTISRDNAKTTLYLQMNSLRPEDTAVYYCTIGGSLSVSSQGTLVTVSS |
| | | ggggsggggsggggsggggsggggsggggssggpGPAGLYAQpgsEVQLVESGGGLVQPGGS |
| | | LRLSCAASGFTFSSYTLAWVRQAPGKcLEWVAAIDSSSYTYSPDTVRGRFTISR |
| | | DNAKNSLYLQMNSLRAEDTAVYYCARDSNWDALDYWGQGTTVTVSSGGGG |
| | | SGGGGSGGGGSDIQMTQSPSSLSASVGDRVTITCKVTEKVWGNVAWYQQKP |
| | | GKAPISLIYSPSLRKSGVPSRFSGSGSGTDFTLTISSLQPEDFATYYCQQYYTYP |
| | | YTFGcGTKVEIKggggsggggsggggsggggsggggsggggsevqllesggglvqpggslrlscaasgsifsa |
| | | namgwyrqapgkqrelvavissggstnyadsvkgrftisrdnskntvylqmnslraedtavyycmysgsyyytpndy |
| | | wgqgtlvtvss** |
| 349 | ACP430 | aptssstkktqlqlehllldlqmilnginnyknpkltrmltfkfympkkatelkhlqcleeelkpleevlnlaqsknfhlrpr |
| | (WW0572) | dlisninvivlelkgsettfmceyadetativeflnrwitfcqsiistltsggpGPAGLYAQpgsEVQLVESGG |
| | | GLVQPGNSLRLSCAASGFTFSKFGMSWVRQAPGKGLEWVSSISGSGRDTLYA |
| | | ESVKGRFTISRDNAKTTLYLQMNSLRPEDTAVYYCTIGGSLSVSSQGTLVTVSS |
| | | ggggsggggsggggsggggsggggsggggssggpGPAGLYAQpgsEVQLVESGGGLVQPGGS |
| | | LRLSCAASGFTFSSYTLAWVRQAPGKGLEWVAAIDSSSYTYSPDTVRGRFTISR |
| | | DNAKNSLYLQMNSLRAEDTAVYYCARDSNWDALDYWGcGTTVTVSSGGGG |
| | | SGGGGSGGGGSDIQMTQSPSSLSASVGDRVTITCKVTEKVWGNVAWYQQKP |
| | | GKcPISLIYSPSLRKSGVPSRFSGSGSGTDFTLTISSLQPEDFATYYCQQYYTYPY |
| | | TFGGGTKVEIKggggsggggsggggsggggsggggsggggsevqllesggglvqpggslrlscaasgsifsan |
| | | amgwyrqapgkqrelvavissggstnyadsvkgrftisrdnskntvylqmnslraedtavyycmysgsyyytpndy |
| | | wgqgtlvtvss** |
| 350 | ACP431 | aptssstkktqlqlehllldlqmilnginnyknpkltrmltfkfympkkatelkhlqcleeelkpleevlnlaqsknfhlrpr |
| | (WW0573) | dlisninvivlelkgsettfmceyadetativeflnrwitfcqsiistltsggpGPAGLYAQpgsEVQLVESGG |
| | | GLVQPGNSLRLSCAASGFTFSKFGMSWVRQAPGKGLEWVSSISGSGRDTLYA |
| | | ESVKGRFTISRDNAKTTLYLQMNSLRPEDTAVYYCTIGGSLSVSSQGTLVTVSS |
| | | ggggsggggsggggsggggsggggsggggssggpGPAGLYAQpgsEVQLVESGGGLVQPGGS |
| | | LRLSCAASGFTFSSYTLAWVRQAPGKcLEWVAAIDSSSYTYSPDTVRGRFTISR |
| | | DNAKNSLYLQMNSLRAEDTAVYYCARDSNWDALDYWGQGTTVTVSSGGGG |
| | | SGGGGSGGGGSDIQMTQSPSSLSASVGDRVTITCKAREKLWSAVAWYQQKPG |
| | | KAPKsLIYSASFRYSGVPSRFSGSGSGTDFTLTISSLQPEDFATYYCQQYYTYPY |
| | | TFGcGTKVEIKggggsggggsggggsggggsggggsggggsevqllesggglvqpggslrlscaasgsifsana |
| | | mgwyrqapgkglelvavissggstnyadsvkgrftisrdnskntvylqmnslraedtavyycmysgsyyytpndyw |
| | | gqgtlvtvss** |
| 351 | ACP432 | aptssstkktqlqlehllldlqmilnginnyknpkltrmltfkfympkkatelkhlqcleeelkpleevlnlaqsknfhlrpr |
| | (WW0574) | dlisninvivlelkgsettfmceyadetativeflnrwitfcqsiistltsggpGPAGLYAQpgsEVQLVESGG |
| | | GLVQPGNSLRLSCAASGFTFSKFGMSWVRQAPGKGLEWVSSISGSGRDTLYA |
| | | ESVKGRFTISRDNAKTTLYLQMNSLRPEDTAVYYCTIGGSLSVSSQGTLVTVSS |
| | | ggggsggggsggggsggggsggggsggggssggpGPAGLYAQpgsEVQLVESGGGLVQPGGS |
| | | LRLSCAASGFTFSSYTLAWVRQAPGKGLEWVAAIDSSSYTYSPDTVRGRFTISR |
| | | DNAKNSLYLQMNSLRAEDTAVYYCARDSNWDALDYWGcGTTVTVSSGGGG |
| | | SGGGGSGGGGSDIQMTQSPSSLSASVGDRVTITCKAREKLWSAVAWYQQKPG |
| | | KcPKALIYSASFRYSGVPSRFSGSGSGTDFTLTISSLQPEDFATYYCQQYYTYPY |
| | | TFGGGTKVEIKggggsggggsggggsggggsggggsggggsevqllesggglvqpggslrlscaasgsifsan |
| | | amgwyrqapgkglelvavissggstnyadsvkgrftisrdnskntvylqmnslraedtavyycmysgsyyytpndy |
| | | wgqgtlvtvss** |
| 352 | ACP433 | aptssstkktqlqlehllldlqmilnginnyknpkltrmltfkfympkkatelkhlqcleeelkpleevlnlaqsknfhlrpr |
| | (WW0575) | dlisninvivlelkgsettfmceyadetativeflnrwitfcqsiistltsggpGPAGLYAQpgsEVQLVESGG |
| | | GLVQPGNSLRLSCAASGFTFSKFGMSWVRQAPGKGLEWVSSISGSGRDTLYA |
| | | ESVKGRFTISRDNAKTTLYLQMNSLRPEDTAVYYCTIGGSLSVSSQGTLVTVSS |
| | | ggggsggggsggggsggggsggggsggggssggpGPAGLYAQpgsEVQLVESGGGLVQPGGS |
| | | LRLSCAASGFTFSSYTLAWVRQAPGKcLEWVAAIDSSSYTYSPDTVRGRFTISR |
| | | DNAKNSLYLQMNSLRAEDTAVYYCARDSNWDALDYWGQGTTVTVSSGGGG |
| | | SGGGGSGGGGSDIQMTQSPSSLSASVGDRVTITCKVTEKVWGNVAWYQQKP |
| | | GKAPISLIYSPSLRKSGVPSRFSGSGSGTDFTLTISSLQPEDFATYYCQQYYTYP |
| | | YTFGcGTKVEIKggggsggggsggggsggggsggggsggggsevqllesggglvqpggslrlscaasgsifsa |
| | | namgwyrqapgkglelvavissggstnyadsvkgrftisrdnskntvylqmnslraedtavyycmysgsyyytpndy |
| | | wgqgtlvtvss** |
| 353 | ACP434 | aptssstkktqlqlehllldlqmilnginnyknpkltrmltfkfympkkatelkhlqcleeelkpleevlnlaqsknfhlrpr |
| | (WW0576) | dlisninvivlelkgsettfmceyadetativeflnrwitfcqsiistltsggpGPAGLYAQpgsEVQLVESGG |
| | | GLVQPGNSLRLSCAASGFTFSKFGMSWVRQAPGKGLEWVSSISGSGRDTLYA |
| | | ESVKGRFTISRDNAKTTLYLQMNSLRPEDTAVYYCTIGGSLSVSSQGTLVTVSS |
| | | ggggsggggsggggsggggsggggsggggssggpGPAGLYAQpgsEVQLVESGGGLVQPGGS |
| | | LRLSCAASGFTFSSYTLAWVRQAPGKGLEWVAAIDSSSYTYSPDTVRGRFTISR |
| | | DNAKNSLYLQMNSLRAEDTAVYYCARDSNWDALDYWGcGTTVTVSSGGGG |
| | | SGGGGSGGGGSDIQMTQSPSSLSASVGDRVTITCKVTEKVWGNVAWYQQKP |
| | | GKcPISLIYSPSLRKSGVPSRFSGSGSGTDFTLTISSLQPEDFATYYCQQYYTYPY |
| | | TFGGGTKVEIKggggsggggsggggsggggsggggsggggsevqllesggglvqpggslrlscaasgsifsan |
| | | amgwyrqapgkglelvavissggstnyadsvkgrftisrdnskntvylqmnslraedtavyycmysgsyyytpndy |
| | | wgqgtlvtvss** |
| 265 | ACP435 | DIQMTQSPSSLSASVGDRVTITCKAREKLWSAVAWYQQKPGKAPKsLIYSASF |
| | (WW0577) | RYSGVPSRFSGSGSGTDFTLTISSLQPEDFATYYCQQYYTYPYTFGGGTKVEIKr |
| | | tvaapsvfifppsdeqlksgtasvvcllnnfypreakvqwkvdnalqsgnsqesvteqdskdstyslsstltlskadyekh |
| | | kvyacevthqglsspvtksfnrgecggggsggggsggggsggggsggggsggggsevqllesggglvqpggslrlsca |
| | | asgsifsanamgwyrqapgkqrelvavissggstnyadsvkgrftisrdnskntvylqmnslraedtavyycmysgsy |
| | | yytpndywgqgtlvtvss** |
| 355 | ACP371 | aptssstkktqlqlehllldlqmilnginnyknpkltrmltfkfympkkatelkhlqcleeelkpleevlnlaqsknfhlrpr |
| | (WW0513) | dlisninvivlelkgsettfmceyadetativeflnrwitfcqsiistltsggpGPAGLYAQpgsEVQLVESGG |
| | | GLVQPGNSLRLSCAASGFTFSKFGMSWVRQAPGKGLEWVSSISGSGRDTLYA |
| | | ESVKGRFTISRDNAKTTLYLQMNSLRPEDTAVYYCTIGGSLSVSSQGTLVTVSS |
| | | ggggsggggsggggsggggsggggsggggssggpGPAGLYAQpgsEVQLVESGGGLVQPGGS |
| | | LRLSCAASGFTFSSYTLAWVRQAPGKcLEWVAAIDSSSYTYSPDTVRGRFTISR |
| | | DNAKNSLYLQMNSLRAEDTAVYYCARDSNWDALDYWGQGTTVTVSSGGGG |
| | | SGGGGSGGGGSDIQMTQSPSSLSASVGDRVTITCKASQNVGTNVGWYQQKPG |
| | | KAPKALIYSASFRYSGVPSRFSGSGSGTDFTLTISSLQPEDFATYYCQQYYTYP |
| | | YTFGcGTKVEIK** |
| 356 | ACP372 | aptssstkktqlqlehllldlqmilnginnyknpkltrmltfkfympkkatelkhlqcleeelkpleevlnlaqsknfhlrpr |
| | (WW0514) | dlisninvivlelkgsettfmceyadetativeflnrwitfcqsiistltsggpGPAGLYAQpgsEVQLVESGG |
| | | GLVQPGNSLRLSCAASGFTFSKFGMSWVRQAPGKGLEWVSSISGSGRDTLYA |
| | | ESVKGRFTISRDNAKTTLYLQMNSLRPEDTAVYYCTIGGSLSVSSQGTLVTVSS |
| | | ggggsggggsggggsggggsggggsggggssggpGPAGLYAQpgsEVQLVESGGGLVQPGGS |
| | | LRLSCAASGFTFSSYTLAWVRQAPGKGLEWVAAIDSSSYTYSPDTVRGRFTISR |
| | | DNAKNSLYLQMNSLRAEDTAVYYCARDSNWDALDYWGcGTTVTVSSGGGG |
| | | SGGGGSGGGGSDIQMTQSPSSLSASVGDRVTITCKASQNVGTNVGWYQQKPG |
| | | KcPKALIYSASFRYSGVPSRFSGSGSGTDFTLTISSLQPEDFATYYCQQYYTYPY |
| | | TFGGGTKVEIK** |
| 357 | ACP373 | aptssstkktqlqlehllldlqmilnginnyknpkltrmltfkfympkkatelkhlqcleeelkpleevlnlaqsknfhlrpr |
| | (WW0515) | dlisninvivlelkgsettfmceyadetativeflnrwitfcqsiistltsggpGPAGLYAQpgsEVQLVESGG |
| | | GLVQPGNSLRLSCAASGFTFSKFGMSWVRQAPGKGLEWVSSISGSGRDTLYA |
| | | ESVKGRFTISRDNAKTTLYLQMNSLRPEDTAVYYCTIGGSLSVSSQGTLVTVSS |
| | | ggggsggggsggggsggggsggggsggggssggpGPAGLYAQpgsEVQLVESGGGLVQPGGS |
| | | LRLSCAASGFTFSSYTLAWVRQAPGKcLEWVAAIDSSSYTYSPDTVRGRFTISR |
| | | DNAKNSLYLQMNSLRAEDTAVYYCARDSNWDALDYWGQGTTVTVSSGGGG |
| | | SGGGGSGGGGSDIQMTQSPSSLSASVGDRVTITCKAREKLWSAVAWYQQKPG |
| | | KAPKALIYSASFRYSGVPSRFSGSGSGTDFTLTISSLQPEDFATYYCQQYYTYP |
| | | YTFGcGTKVEIK** |
| 358 | ACP374 | aptssstkktqlqlehllldlqmilnginnyknpkltrmltfkfympkkatelkhlqcleeelkpleevlnlaqsknfhlrpr |
| | (WW0516) | dlisninvivlelkgsettfmceyadetativeflnrwitfcqsiistltsggpGPAGLYAQpgsEVQLVESGG |
| | | GLVQPGNSLRLSCAASGFTFSKFGMSWVRQAPGKGLEWVSSISGSGRDTLYA |
| | | ESVKGRFTISRDNAKTTLYLQMNSLRPEDTAVYYCTIGGSLSVSSQGTLVTVSS |
| | | ggggsggggsggggsggggsggggsggggssggpGPAGLYAQpgsEVQLVESGGGLVQPGGS |
| | | LRLSCAASGFTFSSYTLAWVRQAPGKGLEWVAAIDSSSYTYSPDTVRGRFTISR |
| | | DNAKNSLYLQMNSLRAEDTAVYYCARDSNWDALDYWGcGTTVTVSSGGGG |
| | | SGGGGSGGGGSDIQMTQSPSSLSASVGDRVTITCKAREKLWSAVAWYQQKPG |
| | | KcPKALIYSASFRYSGVPSRFSGSGSGTDFTLTISSLQPEDFATYYCQQYYTYPY |
| | | TFGGGTKVEIK** |
| 359 | ACP375 | aptssstkktqlqlehllldlqmilnginnyknpkltrmltfkfympkkatelkhlqcleeelkpleevlnlaqsknfhlrpr |
| | (WW0517) | dlisninvivlelkgsettfmceyadetativeflnrwitfcqsiistltsggpGPAGLYAQpgsEVQLVESGG |
| | | GLVQPGNSLRLSCAASGFTFSKFGMSWVRQAPGKGLEWVSSISGSGRDTLYA |
| | | ESVKGRFTISRDNAKTTLYLQMNSLRPEDTAVYYCTIGGSLSVSSQGTLVTVSS |
| | | ggggsggggsggggsggggsggggsggggssggpGPAGLYAQpgsEVQLVESGGGLVQPGGS |
| | | LRLSCAASGFTFSSYTLAWVRQAPGKcLEWVAAIDSSSYTYSPDTVRGRFTISR |
| | | DNAKNSLYLQMNSLRAEDTAVYYCARDSNWDALDYWGQGTTVTVSSGGGG |
| | | SGGGGSGGGGSDIQMTQSPSSLSASVGDRVTITCKVTEKVWGNVAWYQQKP |
| | | GKAPISLIYSPSLRKSGVPSRFSGSGSGTDFTLTISSLQPEDFATYYCQQYYTYP |
| | | YTFGcGTKVEIK** |
| 360 | ACP376 | aptssstkktqlqlehllldlqmilnginnyknpkltrmltfkfympkkatelkhlqcleeelkpleevlnlaqsknfhlrpr |
| | (WW0521) | dlisninvivlelkgsettfmceyadetativeflnrwitfcqsiistltsggpGPAGLYAQpgsEVQLVESGG |
| | | GLVQPGNSLRLSCAASGFTFSKFGMSWVRQAPGKGLEWVSSISGSGRDTLYA |
| | | ESVKGRFTISRDNAKTTLYLQMNSLRPEDTAVYYCTIGGSLSVSSQGTLVTVSS |
| | | ggggsggggsggggsggggsggggsggggssggpGPAGLYAQpgsEVQLVESGGGLVQPGGS |
| | | LRLSCAASGFTFSSYTLAWVRQAPGKGLEWVAAIDSSSYTYSPDTVRGRFTISR |
| | | DNAKNSLYLQMNSLRAEDTAVYYCARDSNWDALDYWGcGTTVTVSSGGGG |
| | | SGGGGSGGGGSDIQMTQSPSSLSASVGDRVTITCKVTEKVWGNVAWYQQKP |
| | | GKcPISLIYSPSLRKSGVPSRFSGSGSGTDFTLTISSLQPEDFATYYCQQYYTYPY |
| | | TFGGGTKVEIK** |
| 361 | ACP377 | aptssstkktqlqlehllldlqmilnginnyknpkltrmltfkfympkkatelkhlqcleeelkpleevlnlaqsknfhlrpr |
| | (WW0519) | dlisninvivlelkgsettfmceyadetativeflnrwitfcqsiistltsggpGPAGLYAQpgsEVQLVESGG |
| | | GLVQPGNSLRLSCAASGFTFSKFGMSWVRQAPGKGLEWVSSISGSGRDTLYA |
| | | ESVKGRFTISRDNAKTTLYLQMNSLRPEDTAVYYCTIGGSLSVSSQGTLVTVSS |
| | | ggggsggggsggggsggggsggggsggggssggpGPAGLYAQpgsevqllesggglvqpggslrlscaasgsi |
| | | fsanamgwyrqapgkqrelvavissggstnyadsvkgrftisrdnskntvylqmnslraedtavyycmysgsyyytp |
| | | ndywgqgtlvtvss** |
| 362 | ACP378 | aptssstkktqlqlehllldlqmilnginnyknpkltrmltfkfympkkatelkhlqcleeelkpleevlnlaqsknfhlrpr |
| | (WW0520) | dlisninvivlelkgsettfmceyadetativeflnrwitfcqsiistltsggpGPAGLYAQpgsEVQLVESGG |
| | | GLVQPGNSLRLSCAASGFTFSKFGMSWVRQAPGKGLEWVSSISGSGRDTLYA |
| | | ESVKGRFTISRDNAKTTLYLQMNSLRPEDTAVYYCTIGGSLSVSSQGTLVTVSS |
| | | ggggsggggsggggsggggsggggsggggssggpGPAGLYAQpgsEVQLVESGGGLVQPGGS |
| | | LRLSCAASGFTFSSYTLAWVRQAPGKGLEWVAAIDSSSYTYSPDTVRGRFTISR |
| | | DNAKNSLYLQMNSLRAEDTAVYYCARDSNWDALDYWGQGTTVTVSSastkgps |
| | | vfplapsskstsggtaalgclvkdyfpepvtvswnsgaltsgvhtfpavlqssglyslssvvtvpssslgtqtyicnvnhkp |
| | | sntkvdkrvepksc** |
| 363 | ACP379 | eskygppcppcpapeflggpsvflfppkpkdtlmisrtpevtcvwdvsqedpevqfnwyvdgvevhnaktkpree |
| | (WW0521) | qfnstyrvvsvltvlhqdwlngkeykckvsnkglpssiektiskakgqprepqvytlppsqeemtknqvsltclvkgfy |
| | | psdiavewesngqpennykttppvldsdgsfflysrltvdksrwqegnvfscsvmhealhnhytqkslslslgksggp |
| | | GPAGLYAQpgsaptssstkktqlqlehllldlqmilnginnyknpkltrmltfkfympkkatelkhlqcleeelkpl |
| | | eevlnlaqsknfhlrprdlisninvivlelkgsettfmceyadetativeflnrwitfcqsiistltggggsggggsggggsgg |
| | | ggsggggsggggssggpGPAGLYAQpgsEVQLVESGGGLVQPGGSLRLSCAASGFTFS |
| | | SYTLAWVRQAPGKGLEWVAAIDSSSYTYSPDTVRGRFTISRDNAKNSLYLQM |
| | | NSLRAEDTAVYYCARDSNWDALDYWGQGTTVTVSSastkgpsvfplapsskstsggtaal |
| | | gclvkdyfpepvtvswnsgaltsgvhtfpavlqssglyslssvvtvpssslgtqtyicnvnhkpsntkvdkrvepksc** |
| 364 | ACP368 | EVQLVESGGGLVQPGGSLRLSCAASGFTFSSYTLAWVRQAPGKGLEWVAAID |
| | (WW0446) | SSSYTYSPDTVRGRFTISRDNAKNSLYLQMNSLRAEDTAVYYCARDSNWDAL |
| | | DYWGQGTTVTVSSsggpGPAGLYAQpgsDIQMTQSPSSLSASVGDRVTITCKVTE |
| | | KVWGNVAWYQQKPGKAPISLIYSPSLRKSGVPSRFSGSGSGTDFTLTISSLQPE |
| | | DFATYYCQQYYTYPYTFGGGTKVEIKHHHHHH |
| 365 | ACP365 | EVQLVESGGGLVQPGGSLRLSCAASGFTFSSYTLAWVRQAPGKGLEWVAAID |
| | (WW0443) | SSSYTYSPDTVRGRFTISRDNAKNSLYLQMNSLRAEDTAVYYCARDSNWDAL |
| | | DYWGQGTTVTVSSsggpGPAGLYAQpgsDIQMTQSPSSLSASVGDRVTITCKARE |
| | | KLWSAVAWYQQKPGKAPKALIYSASFRYSGVPSRFSGSGSGTDFTLTISSLQPE |
| | | DFATYYCQQYYTYPYTFGGGTKVEIKHHHHHH |
| 366 | ACP366 | EVQLVESGGGLVQPGGSLRLSCAASGFTFSSYTLAWVRQAPGKGLEWVAAID |
| | (WW0444) | SSSYTYSPDTVRGRFTISRDNAKNSLYLQMNSLRAEDTAVYYCARDSNWDAL |
| | | DYWGQGTTVTVSSsggpGPAGLYAQpgsDIQMTQSPSSLSASVGDRVTITCKARE |
| | | KLWSAVAWYQQKPGKAPKsLIYSASFRYSGVPSRFSGSGSGTDFTLTISSLQPE |
| | | DFATYYCQQYYTYPYTFGGGTKVEIKHHHHHH |
| 367 | ACP284 | EVQLVESGGGLVQPGNSLRLSCAASGFTFSKFGMSWVRQAPGKGLEWVSSIS |
| | | GSGRDTLYAESVKGRFTISRDNAKTTLYLQMNSLRPEDTAVYYCTIGGSLSVS |
| | | SQGTLVTVSSSGGPGPAGMKGLPGSrvipvsgparclsqsrnllkttddmvktareklkhysctaedi |
| | | dheditrdqtstlktclplelhkiiesclatretssttrgsclppqktslmmtlclgsiyedlkmyqtefqainaalqnhiihq |
| | | qiildkgmlvaidelmqslnhngetlrqkppvgeadpyrvkmklcillhafstrvvtinrvmgylssaSGGPGPAG |
| | | MKGLPGSggggsggggsggggsggggsggggsggggsQSVLTQPPSVSGAPGQRVTISCSGS |
| | | RSNIGSNTVKWYQQLPGTAPKLLIYYNDQRPSGVPDRFSGSKSGTSASLAITGL |
| | | QAEDEADYYCQSYDRYTHPALLFGTGTKVTVLggggsggggsggggsQVQLVESGG |
| | | GVVQPGRSLRLSCAASGFTFSSYGMHWVRQAPGKGLEWVAFIRYDGSNKYY |
| | | ADSVKGRFTISRDNSKNTLYLQMNSLRAEDTAVYYCKTHGSHDNWGQGTMV |
| | | TVSS |
| 368 | ACP285 | EVQLVESGGGLVQPGNSLRLSCAASGFTFSKFGMSWVRQAPGKGLEWVSSIS |
| | | GSGRDTLYAESVKGRFTISRDNAKTTLYLQMNSLRPEDTAVYYCTIGGSLSVS |
| | | SQGTLVTVSSSGGPGPAGMKGLPGSiwelkkdvyvveldwypdapgemvvltcdtpeedgitwtl |
| | | dqssevlgsgktltiqvkefgdagqytchkggevlshsllllhkkedgiwstdilkdqkepknktflrceaknysgrftcw |
| | | wlttistdltfsvkssrgssdpqgvtcgaatlsaervrgdnkeyeysvecqedsaSpaaeeslpievmvdavhklkyeny |
| | | tssffirdiikpdppknlqlkplknsrqvevsweypdtwstphsyfsltfcvqvqgkskrekkdrvftdktsatvicrkna |
| | | sisvraqdryyssswsewasvpcsggggsggggsggggsrvipvsgparclsqsrnllkttddmvktareklkhyscta |
| | | edidheditrdqtstlktclplelhknesSlatretssttrgsclppqktslmmtlclgsiyedlkmyqtefqainaalqnlmh |
| | | qqiildkgmlvaidelmqslnhngetlrqkppvgeadpyrvkmklcillhafstrvvtinrvmgylssaSGGPGPA |
| | | GMKGLPGSggggsggggsggggsggggsggggsggggsQSVLTQPPSVSGAPGQRVTISCS |
| | | GSRSNIGSNTVKWYQQLPGTAPKLLIYYNDQRPSGVPDRFSGSKSGTSASLAIT |
| | | GLQAEDEADYYCQSYDRYTHPALLFGTGTKVTVLggggsggggsggggsQVQLVES |
| | | GGGVVQPGRSLRLSCAASGFTFSSYGMHWVRQAPGKGLEWVAFIRYDGSNK |
| | | YYADSVKGRFTISRDNSKNTLYLQMNSLRAEDTAVYYCKTHGSHDNWGQGT |
| | | MVTVSS |
| 369 | ACP286 | EVQLVESGGGLVQPGNSLRLSCAASGFTFSKFGMSWVRQAPGKGLEWVSSIS |
| | | GSGRDTLYAESVKGRFTISRDNAKTTLYLQMNSLRPEDTAVYYCTIGGSLSVS |
| | | SQGTLVTVSSSGGPGPAGMKGLPGSiwelkkdvyvveldwypdapgemvvltcdtpeedgitwtl |
| | | dqssevlgsgktltiqvkefgdagqytchkggevlshsllllhkkedgiwstdilkdqkepknktflrceaknysgrftcw |
| | | wlttistdltfsvkssrgssdpqgvtcgaatlsaervrgdnkeyeysvecqedsacpaaeeslpievmvdavhklkyeny |
| | | tssffirdiikpdppknlqlkplknsrqvevsweypdtwstphsyfsltfcvqvqgkskrekkdrvftdktsatvicrkna |
| | | sisvraqdryyssswsewasvpcsggggsggggsggggsggggsrvipvsgparclsqsmllkttddmvktareklk |
| | | hysctaedidheditrdqtstlktclplelhknesclatretssttrgsclppqktslmmtlclgsiyedlkmyqtefqainaal |
| | | qnhnliqqiildkgmlvaidelmqslnhngetlrqkppvgeadpyrvkmklcillhafstrwtinrvmgylssaSGG |
| | | PGPAGMKGLPGSggggsggggsggggsggggsggggsggggsQSVLTQPPSVSGAPGQRVT |
| | | ISCSGSRSNIGSNTVKWYQQLPGTAPKLLIYYNDQRPSGVPDRFSGSKSGTSAS |
| | | LAITGLQAEDEADYYCQSYDRYTHPALLFGTGTKVTVLggggsggggsggggsQVQ |
| | | LVESGGGVVQPGRSLRLSCAASGFTFSSYGMHWVRQAPGKGLEWVAFIRYDG |
| | | SNKYYADSVKGRFTISRDNSKNTLYLQMNSLRAEDTAVYYCKTHGSHDNWG |
| | | QGTMVTVSS |
| 370 | ACP287 | EVQLVESGGGLVQPGNSLRLSCAASGFTFSKFGMSWVRQAPGKGLEWVSSIS |
| | | GSGRDTLYAESVKGRFTISRDNAKTTLYLQMNSLRPEDTAVYYCTIGGSLSVS |
| | | SQGTLVTVSSSGGPGPAGMKGLPGSiwelkkdvyvveldwypdapgemvvltcdtpeedgitwtl |
| | | dqssevlgsgktltiqvkefgdagqytchkggevlshsllllhkkedgiwstdilkdqkepknktflrceaknysgrftcw |
| | | wlttistdltfsvkssrgssdpqgvtcgaatlsaervrgdnkeyeysvecqedsacpaaeeslpievmvdavhklkyeny |
| | | tssffirdiikpdppknlqlkplknsrqvevsweypdtwstphsyfsltfcvqvqgkskrekkdrvftdktsatvicrkna |
| | | sisvraqdryyssswsewasvpcsggggsggggsggggsrvipvsgparclsqsrnllkttddmvktareklkhyscta |
| | | edidheditrdqtstlktclplelhknesclatretssttrgsclppqktslmmtlclgsiyedlkmyqtefqainaalqnhnh |
| | | qqiildkgmlvaidelmqslnhngetlrqkppvgeadpyrvkmklcillhafstrvvtinrvmgylssaSGGPGPA |
| | | GMKGLPGSggggsggggsggggsggggsggggsggggsQSVLTQPPSVSGAPGQRVTISCS |
| | | GSRSNIGSNTVKWYQQLPGTAPKLLIYYNDQRPSGVPDRFSGSKSGTSASLAIT |
| | | GLQAEDEADYYCQSYDRYTHPALLFGcGTKVTVLggggsggggsggggsQVQLVES |
| | | GGGVVQPGRSLRLSCAASGFTFSSYGMHWVRQAPGKcLEWVAFIRYDGSNKY |
| | | YADSVKGRFTISRDNSKNTLYLQMNSLRAEDTAVYYCKTHGSHDNWGQGTM |
| | | VTVSS |
| 371 | ACP288 | EVQLVESGGGLVQPGNSLRLSCAASGFTFSKFGMSWVRQAPGKGLEWVSSIS |
| | | GSGRDTLYAESVKGRFTISRDNAKTTLYLQMNSLRPEDTAVYYCTIGGSLSVS |
| | | SQGTLVTVSSSGGPGPAGMKGLPGSiwelkkdvyvveldwypdapgemvvltcdtpeedgitwtl |
| | | dqssevlgsgktltiqvkefgdagqytchkggevlshsllllhkkedgiwstdilkdqkepknktflrceaknysgrftcw |
| | | wlttistdltfsvkssrgssdpqgvtcgaatlsaervrgdnkeyeysvecqedsacpaaeeslpievmvdavhklkyeny |
| | | tssffirdiikpdppknlqlkplknsrqvevsweypdtwstphsyfsltfcvqvqgkskrekkdrvftdktsatvicrkna |
| | | sisvraqdryyssswsewasvpcsggggsggggsggggsrvipvsgparclsqsrnllkttddmvktareklkhyscta |
| | | edidheditrdqtstlktclplelhknesclatretssttrgsclppqktslmmtlclgsiyedlkmyqtefqainaalqnhnh |
| | | qqiildkgmlvaidelmqslnhngetlrqkppvgeadpyrvkmklcillhafstrvvtinrvmgylssaSGGPGPA |
| | | GMKGLPGSggggsggggsggggsggggsggggsggggsQSVLTQPPSVSGAPGQRVTISCS |
| | | GSRSNIGSNTVKWYQQLPGTcPKLLIYYNDQRPSGVPDRFSGSKSGTSASLAIT |
| | | GLQAEDEADYYCQSYDRYTHPALLFGTGTKVTVLggggsggggsggggsQVQLVES |
| | | GGGVVQPGRSLRLSCAASGFTFSSYGMHWVRQAPGKGLEWVAFIRYDGSNK |
| | | YYADSVKGRFTISRDNSKNTLYLQMNSLRAEDTAVYYCKTHGSHDNWGcGT |
| | | MVTVSS |
| 372 | ACP289 | aptssstkktqlqlehllldlqmilnginnyknpkltrmltfkfympkkatelkhlqcleeelkpleevlnlaqsknfhlrpr |
| | (WW0233) | dlisninvivlelkgsettfmceyadetativeflnrwitfcqsiistltsggpgpagmkglpgsevqlvesggglvqpgns |
| | | lrlscaasgftfskfgmswvrqapgkglewvssisgsgrdtlyaesvkgrftisrdnakttlylqmnslrpedtavyyctig |
| | | gslsvssqgtlvtvssggggsggggsggggsggggsggggsggggssggpgpagmkglpgsevqlvesggglvqpg |
| | | gslrlscaasgftfssytlawvrqapgkglewvaaidsssytyspdtvrgrftisrdnaknslylqmnslraedtavyycar |
| | | dsnwdaldywgqgttvtvssggggsggggsggggsdiqmtqspsslsasvgdrvtitckasqnvgtnvgwyqqkpg |
| | | kapkaliysasfrysgvpsrfsgsgsgtdftltisslqpedfatyycqqyytypytfgggtkveikhhhhhh |
| 373 | ACP290 | aptssstkktqlqlehllldlqmilnginnyknpkltrmltfkfympkkatelkhlqcleeelkpleevlnlaqsknfhlrpr |
| | (WW0234) | dlisninvivlelkgsettfmceyadetativeflnrwitfcqsiistltsggpgpagmkglpgsevqlvesggglvqpgns |
| | | lrlscaasgftfskfgmswvrqapgkglewvssisgsgrdtlyaesvkgrftisrdnakttlylqmnslrpedtavyyctig |
| | | gslsvssqgtlvtvssggggsggggsggggsggggsggggsggggssggpgpagmkglpgQVQLQESGGG |
| | | LVQTGGSLRLSCTTSGTIFSGYTMGWYRQAPGEQRELVAVISGGGDTNYADS |
| | | VKGRFTISRDNTKDTMYLQMNSLKPEDTAVYYCYSREVTPPWKLYWGQGTQ |
| | | VTVSSAAAYPYDVPDYGSHHHHHH |
| 374 | ACP291 | aptssstkktqlqlehllldlqmilnginnyknpkltrmltfkfympkkatelkhlqcleeelkpleevlnlaqsknfhlrpr |
| | (WW0235) | dlisninvivlelkgsettfmceyadetativeflnrwitfcqsiistltsggpgpagmkglpgsevqlvesggglvqpgns |
| | | lrlscaasgftfskfgmswvrqapgkglewvssisgsgrdtlyaesvkgrftisrdnakttlylqmnslrpedtavyyctig |
| | | gslsvssqgtlvtvssggggsggggsggggsggggsggggsggggssggpgpagmkglpgQVQLQESGGG |
| | | LVQEGGSLRLSCAASERIFSTDVMGWYRQAAEKQRELVAVVSARGTTNYLDA |
| | | VKGRFTISRDNARNTLTLQMNDLKPEDTASYYCYVRETTSPWRIYWGQGTQV |
| | | TVSSAAAYPYDVPDYGSHHHHHH |
| 375 | ACP292 | aptssstkktqlqlehllldlqnulngirmyknpkltnnltfkfympkkatelkhlqcleeelkpleevlnlaqsknfhlrpr |
| | (WW0236) | dlisninvivlelkgsettfmceyadetativeflnrwitfcqsiistltsggpgpagmkglpgsevqlvesggglvqpgns |
| | | lrlscaasgftfskfgmswvrqapgkglewvssisgsgrdtlyaesvkgrftisrdnakttlylqmnslrpedtavyyctig |
| | | gslsvssqgtlvtvssggggsggggsggggsggggsggggsggggssggpgpagmkglpgQVQLQESGGG |
| | | LVQAGGSLRLSCAASGSIFSANAMGWYRQAPGKQRELVAVISSGGSTNYADS |
| | | VKGRFTISRDNAKNTVYLQMNSLKPEDTAVYYCMYSGSYYYTPNDYWGQGT |
| | | QVTVSSAAAYPYDVPDYGSHHHHHH |
| 376 | ACP296 | aptssstkktqlqlehllldlqmilnginnyknpkltrmltfkfympkkatelkhlqcleeelkpleevlnlaqsknfhlrpr |
| | (WW0250) | dlisninvivlelkgsettfmceyadetativeflnrwitfcqsiistltSGGPGPAGMKGLPGSEVQLVES |
| | | GGGLVQPGNSLRLSCAASGFTFSKFGMSWVRQAPGKGLEWVSSISGSGRDTL |
| | | YAESVKGRFTISRDNAKTTLYLQMNSLRPEDTAVYYCTIGGSLSVSSQGTLVT |
| | | VSSggggsggggsggggsggggsggggsggggsSGGPGPAGMKGLPGSEVQLVESGGGLV |
| | | QPGGSLRLSCAASGFTFSSYTLAWVRQAPGKGLEWVAAIDSSSYTYSPDTVRG |
| | | RFTISRDNAKNSLYLQMNSLRAEDTAVYYCARDSNWDALDYWGQGTTVTVS |
| | | SSGGPGPAGMKGLPGSDIQMTQSPSSLSASVGDRVTITCKASQNVGTNVGWY |
| | | QQKPGKAPKALIYSASFRYSGVPSRFSGSGSGTDFTLTISSLQPEDFATYYCQQ |
| | | YYTYPYTFGGGTKVEIKHHHHHHEPEA** |
| 377 | ACP297 | aptssstkktqlqlehllldlqmilnginnyknpkltrmltfkfympkkatelkhlqcleeelkpleevlnlaqsknfhlrpr |
| | (WW0251) | dlisninvivlelkgsettfmceyadetativeflnrwitfcqsiistltSGGPGPAGMKGLPGSEVQLVES |
| | | GGGLVQPGNSLRLSCAASGFTFSKFGMSWVRQAPGKGLEWVSSISGSGRDTL |
| | | YAESVKGRFTISRDNAKTTLYLQMNSLRPEDTAVYYCTIGGSLSVSSQGTLVT |
| | | VSSggggsggggsggggsggggsggggsggggsSGGPGPAGMKGLPGSEVQLVESGGGLV |
| | | QPGGSLRLSCAASGFTFSSYTLAWVRQAPGKGLEWVAAIDSSSYTYSPDTVRG |
| | | RFTISRDNAKNSLYLQMNSLRAEDTAVYYCARDSNWDALDYWGQGTTVTVS |
| | | SGGGGSGGGGSGGGGSDIQMTQSPSSLSASVGDRVTITCKASQNVGTNVGWY |
| | | QQKPGKAPKLLIYSASFRYSGVPSRFSGSGSGTDFTLTISSLQPEDFATYYCQQ |
| | | YYTYPYTFGGGTKVEIKHHHHHHEPEA** |
| 378 | ACP298 | aptssstkktqlqlehllldlqmilnginnyknpkltrmltfkfympkkatelkhlqcleeelkpleevlnlaqsknfhlrpr |
| | (WW0252) | dlisninvivlelkgsettfmceyadetativeflnrwitfcqsiistltSGGPGPAGMKGLPGSEVQLVES |
| | | GGGLVQPGNSLRLSCAASGFTFSKFGMSWVRQAPGKGLEWVSSISGSGRDTL |
| | | YAESVKGRFTISRDNAKTTLYLQMNSLRPEDTAVYYCTIGGSLSVSSQGTLVT |
| | | VSSggggsggggsggggsggggsggggsggggsSGGPGPAGMKGLPGSEVQLVESGGGLV |
| | | QPGGSLRLSCAASGFTFSSYTLAWVRQAPGKGLEWVAAIDSSSYTYSPDTVRG |
| | | RFTISRDNAKNSLYLQMNSLRAEDTAVYYCARDSNWDALDYWGQGTTVTVS |
| | | SGGGGSGGGGSGGGGSDIQMTQSPSSLSASVGDRVTITCKASQNVGTNVGWY |
| | | QQKPGKAPKGLIYSASFRYSGVPSRFSGSGSGTDFTLTISSLQPEDFATYYCQQ |
| | | YYTYPYTFGGGTKVEIKHHHHHHEPEA** |
| 379 | ACP299 | aptssstkktqlqlehllldlqmilnginnyknpkltrmltfkfympkkatelkhlqcleeelkpleevlnlaqsknfhlrpr |
| | (WW0253) | dlisninvivlelkgsettfmceyadetativeflnrwitfSqsiistltSGGPGPAGMKGLPGSEVQLVES |
| | | GGGLVQPGNSLRLSCAASGFTFSKFGMSWVRQAPGKGLEWVSSISGSGRDTL |
| | | YAESVKGRFTISRDNAKTTLYLQMNSLRPEDTAVYYCTIGGSLSVSSQGTLVT |
| | | VSSggggsggggsggggsggggsggggsggggsSGGPGPAGMKGLPGSEVQLVESGGGLV |
| | | QPGGSLRLSCAASGFTFSSYTLAWVRQAPGKGLEWVAAIDSSSYTYSPDTVRG |
| | | RFTISRDNAKNSLYLQMNSLRAEDTAVYYCARDSNWDALDYWGQGTTVTVS |
| | | SGGGGSGGGGSGGGGSDIQMTQSPSSLSASVGDRVTITCKASQNVGTNVGWY |
| | | QQKPGKAPKALIYSASFRYSGVPSRFSGSGSGTDFTLTISSLQPEDFATYYCQQ |
| | | YYTYPYTFGGGTKVEIKHHHHHHEPEA** |
| 380 | ACP300 | aptssstkktqlqlehllldlqmilnginnyknpkltrmltfkfympkkatelkhlqcleeelkpleevlnlaqsknfhlrpr |
| | (WW0255) | dlisninvivlelkgsettfmceyadetativeflnrwitfcqsiistltSGGPGPAGMKGLPGSdahksevahif |
| | | kdlgeenfkalvliafaqylqqcpfedhvklvnevtefaktcvadesaencdkslhtlfgdklctvatlretygemadcca |
| | | kqepeniecflqhkddnpnlprlvrpevdvmctafhdneetflkkylyeiarrhpyfyapellffakiykaafteccqaa |
| | | dkaacllpkldelrdegkassakqrlkcaslqkfgerafkawavarlsqrfpkaefaevsklvtdltkvhtecchgdlleca |
| | | ddradlakyicenqdsissklkeccekpllekshciaevendempadlpslaadfveskdvcknyaeakdvflgmfly |
| | | eyarrhpdysvvlllrlaktyettlekccaaadphecyakvfdefkplveepqnlikqncelfeqlgeykfqnallvrytkk |
| | | vpqvstptlvevsrnlgkvgskcckhpeakrmpcaedylsvvlnqlevlhektpvsdrvtkccteslvnrrpcfsalevd |
| | | etyvpkefnaetftfhadictlsekerqikkqtalvelvkhkpkatkeqlkavmddfaafvekcckaddketcfaeegkk |
| | | IvaasqaalglggggsggggsggggsggggsggggsggggsSGGPGPAGMKGLPGSEVQLVESGG |
| | | GLVQPGGSLRLSCAASGFTFSSYTLAWVRQAPGKGLEWVAAIDSSSYTYSPDT |
| | | VRGRFTISRDNAKNSLYLQMNSLRAEDTAVYYCARDSNWDALDYWGQGTTV |
| | | TVSSGGGGSGGGGSGGGGSDIQMTQSPSSLSASVGDRVTITCKASQNVGTNVG |
| | | WYQQKPGKAPKALIYSASFRYSGVPSRFSGSGSGTDFTLTISSLQPEDFATYYC |
| | | QQYYTYPYTFGGGTKVEIKHHHHHHEPEA** |
| 381 | ACP302 | aptssstkktqlqlehllldlqmilnginnyknpkltrmltfkfympkkatelkhlqcleeelkpl |
| | (WW0296) | eevlnlaqsknfhlrprdlisninvivlelkgsettfmceyadetativeflnrwitfcqsiistl |
| | | tSGGPGPAGMKGLPGSEAHKSEIAHRYNDLGEQHFKGLVLIAFSQYLQKCSYDEHAKLVQEVTDFA |
| | | KTCVADESAANCDKSLHTLFGDKLCAIPNLRENYGELADCCTKQEPERNECFLQHKDDNPSLP |
| | | PFERPEAEAMCTSFKENPTTFMGHYLHEVARRHPYFYAPELLYYAEQYNEILT |
| | | QCCAEADKESCLTPKLDGVKEKALVSSVRQRMKCSSMQKFGERAFKAWAVA |
| | | RLSQTFPNADFAEITKLATDLTKVNKECCHGDLLECADDRAELAKYMCENQA |
| | | TISSKLQTCCDKPLLKKAHCLSEVEHDTMPADLPAIAADFVEDQEVCKNYAEA |
| | | KDVFLGTFLYEYSRRHPDYSVSLLLRLAKKYEATLEKCCAEANPPACYGTVL |
| | | AEFQPLVEEPKNLVKTNCDLYEKLGEYGFQNAILVRYTQKAPQVSTPTLVEAA |
| | | RNLGRVGTKCCTLPEDQRLPCVEDYLSAILNRVCLLHEKTPVSEHVTKCCSGS |
| | | LVERRPCFSALTVDETYVPKEFKAETFTFHSDICTLPEKEKQIKKQTALAELVK |
| | | HKPKATAEQLKTVMDDFAQFLDTCCKAADKDTCFSTEGPNLVTRCKDALAgg |
| | | ggsggggsggggsggggsggggsggggsSGGPGPAGMKGLPGSEVQLVESGGGLVQPGGS |
| | | LRLSCAASGFTFSSYTLAWVRQAPGKGLEWVAAIDSSSYTYSPDTVRGRFTISR |
| | | DNAKNSLYLQMNSLRAEDTAVYYCARDSNWDALDYWGQGTTVTVSSGGGG |
| | | SGGGGSGGGGSDIQMTQSPSSLSASVGDRVTITCKASQNVGTNVGWYQQKPG |
| | | KAPKALIYSASFRYSGVPSRFSGSGSGTDFTLTISSLQPEDFATYYCQQYYTYP |
| | | YTFGGGTKVEIKHHHHHH** |
| 382 | ACP303 | EAHKSEIAHRYNDLGEQHFKGLVLIAFSQYLQKCSYDEHAKLVQEVTDFAKT |
| | | CVADESAANCDKSLHTLFGDKLCAIPNLRENYGELADCCTKQEPERNECFLQH |
| | | KDDNPSLPPFERPEAEAMCTSFKENPTTFMGHYLHEVARRHPYFYAPELLYYA |
| | | EQYNEILTQCCAEADKESCLTPKLDGVKEKALVSSVRQRMKCSSMQKFGERA |
| | | FKAWAVARLSQTFPNADFAEITKLATDLTKVNKECCHGDLLECADDRAELAK |
| | | YMCENQATISSKLQTCCDKPLLKKAHCLSEVEHDTMPADLPAIAADFVEDQE |
| | | VCKNYAEAKDVFLGTFLYEYSRRHPDYSVSLLLRLAKKYEATLEKCCAEANP |
| | | PACYGTVLAEFQPLVEEPKNLVKTNCDLYEKLGEYGFQNAILVRYTQKAPQV |
| | | STPTLVEAARNLGRVGTKCCTLPEDQRLPCVEDYLSAILNRVCLLHEKTPVSE |
| | | HVTKCCSGSLVERRPCFSALTVDETYVPKEFKAETFTFHSDICTLPEKEKQIKK |
| | | QTALAELVKHKPKATAEQLKTVMDDFAQFLDTCCKAADKDTCFSTEGPNLVT |
| | | RCKDALASGGPGPAGMKGLPGStfkfympkkatelkhlqcleeelkpleevlnlaqsknfhlrprdlis |
| | | ninvivlelkgsettfmceyadetativeflnrwitfcqsiistltGGssstkktqlqlehllldlqmilnginnyknpkltrm |
| | | ISGGPGPAGMKGLPGSEAHKSEIAHRYNDLGEQHFKGLVLIAFSQYLQKCSYD |
| | | EHAKLVQEVTDFAKTCVADESAANCDKSLHTLFGDKLCAIPNLRENYGELAD |
| | | CCTKQEPERNECFLQHKDDNPSLPPFERPEAEAMCTSFKENPTTFMGHYLHEV |
| | | ARRHPYFYAPELLYYAEQYNEILTQCCAEADKESCLTPKLDGVKEKALVSSVR |
| | | QRMKCSSMQKFGERAFKAWAVARLSQTFPNADFAEITKLATDLTKVNKECC |
| | | HGDLLECADDRAELAKYMCENQATISSKLQTCCDKPLLKKAHCLSEVEHDTM |
| | | PADLPAIAADFVEDQEVCKNYAEAKDVFLGTFLYEYSRRHPDYSVSLLLRLAK |
| | | KYEATLEKCCAEANPPACYGTVLAEFQPLVEEPKNLVKTNCDLYEKLGEYGF |
| | | QNAILVRYTQKAPQVSTPTLVEAARNLGRVGTKCCTLPEDQRLPCVEDYLSAI |
| | | LNRVCLLHEKTPVSEHVTKCCSGSLVERRPCFSALTVDETYVPKEFKAETFTFH |
| | | SDICTLPEKEKQIKKQTALAELVKHKPKATAEQLKTVMDDFAQFLDTCCKAA |
| | | DKDTCFSTEGPNLVTRCKDALAHHHHHH** |
| 383 | ACP304 | aptssstkktqlqlehllldlqmilnginnyknpkltrmltfkfympkkatelkhlqcleeelkpleevlnlaqsknfhlrpr |
| | (WW0302) | dlisninvivlelkgsettfmceyadetativeflnrwitfcqsiistltSGGPGPAGMKGLPGSEVQLVES |
| | | GGGLVQPGNSLRLSCAASGFTFSKFGMSWVRQAPGKGLEWVSSISGSGRDTL |
| | | YAESVKGRFTISRDNAKTTLYLQMNSLRPEDTAVYYCTIGGSLSVSSQGTLVT |
| | | VSSggggsggggsggggsggggsggggsggggsSGGPGPAGMKGLPGSEVQLVESGGGLV |
| | | QPGGSLRLSCAASGFTFSSYTLAWVRQAPGKGLEWVAAIDSSSYTYSPDTVRG |
| | | RFTISRDNAKNSLYLQMNSLRAEDTAVYYCARDSNWDALDYWGQGTTVTVS |
| | | SGGGGSGGGGSGGGGSDIQMTQSPSSLSASVGDRVTITCKASQNVGTNVGWY |
| | | QQKPGKAPKALIYSASFRYSGVPSRFSGSGSGTDFTLTISSLQPEDFATYYCQQ |
| | | YYTYPYTFGGGTKVEIKSGGPGPAGMKGLPGSggggsggggsggggsggggsggggsggg |
| | | gselcdddppeiphatfkamaykegtmlnceckrgfrriksgslymlctgnsshsswdnqcqctssatrnttkqvtpqp |
| | | eeqkerkttemqspmqpvdqaslpghcrepppweneateriyhfvvgqmvyyqcvqgyralhrgpaesvckmth |
| | | gktrwtqpqlictgemetsqfpgeekpqaspegrpesetsclvtttdfqiqtemaatmetsiftteyqHHHHHH** |
| 384 | ACP305 | elcdddppeiphatfkamaykegtmlnceckrgfrriksgslymlctgnsshsswdnqcqctssatrnttkqvtpqpee |
| | (WW0303) | qkerkttemqspmqpvdqaslpghcrepppweneateriylrfwgqmvyyqcvqgyralhrgpaesvckmthgk |
| | | trwtqpqlictgemetsqfpgeekpqaspegrpesetsclvtttdfqiqtemaatmetsiftteyqggggsggggsgggg |
| | | sggggsggggsggggsSGGPGPAGMKGLPGSaptssstkktqlqlehllldlqmilnginnyknpkltrmltf |
| | | kfympkkatelkhlqcleeelkpleevlnlaqsknfhlrprdlisninvivlelkgsettfmceyadetativeflnrwitfc |
| | | qsiistltSGGPGPAGMKGLPGSEVQLVESGGGLVQPGNSLRLSCAASGFTFSKFG |
| | | MSWVRQAPGKGLEWVSSISGSGRDTLYAESVKGRFTISRDNAKTTLYLQMNS |
| | | LRPEDTAVYYCTIGGSLSVSSQGTLVTVSSggggsggggsggggsggggsggggsggggsSG |
| | | GPGPAGMKGLPGSEVQLVESGGGLVQPGGSLRLSCAASGFTFSSYTLAWVRQ |
| | | APGKGLEWVAAIDSSSYTYSPDTVRGRFTISRDNAKNSLYLQMNSLRAEDTAV |
| | | YYCARDSNWDALDYWGQGTTVTVSSGGGGSGGGGSGGGGSDIQMTQSPSSL |
| | | SASVGDRVTITCKASQNVGTNVGWYQQKPGKAPKALIYSASFRYSGVPSRFSG |
| | | SGSGTDFTLTISSLQPEDFATYYCQQYYTYPYTFGGGTKVEIKHHHHHH** |
| 385 | ACP306 | aptssstkktqlqlehllldlqmilnginnyknpkltrmltfkfympkkatelkhlqcleeelkpleevlnlaqsknfhlrpr |
| | (WW0304) | dlisninvivlelkgsettfmceyadetativeflnrwitfcqsiistltSGGPGPAGMKGLPGSggggsggggs |
| | | ggggsggggsggggsggggselcdddppeiphatfkamaykegtmlnceckrgfrriksgslymlctgnsshsswd |
| | | nqcqctssatrnttkqvtpqpeeqkerkttemqspmqpvdqaslpghcrepppweneateriyhfvvgqmvyyqcv |
| | | qgyralhrgpaesvckmthgktrwtqpqlictgemetsqfpgeekpqaspegrpesetsclvtttdfqiqtemaatmets |
| | | iftteyqSGGPGPAGMKGLPGSEVQLVESGGGLVQPGNSLRLSCAASGFTFSKFG |
| | | MSWVRQAPGKGLEWVSSISGSGRDTLYAESVKGRFTISRDNAKTTLYLQMNS |
| | | LRPEDTAVYYCTIGGSLSVSSQGTLVTVSSggggsggggsggggsggggsggggsggggsSG |
| | | GPGPAGMKGLPGSEVQLVESGGGLVQPGGSLRLSCAASGFTFSSYTLAWVRQ |
| | | APGKGLEWVAAIDSSSYTYSPDTVRGRFTISRDNAKNSLYLQMNSLRAEDTAV |
| | | YYCARDSNWDALDYWGQGTTVTVSSGGGGSGGGGSGGGGSDIQMTQSPSSL |
| | | SASVGDRVTITCKASQNVGTNVGWYQQKPGKAPKALIYSASFRYSGVPSRFSG |
| | | SGSGTDFTLTISSLQPEDFATYYCQQYYTYPYTFGGGTKVEIKHHHHHH** |
| 386 | ACP307 | EVQLVESGGGLVQPGNSLRLSCAASGFTFSKFGMSWVRQAPGKGLEWVSSIS |
| | | GSGRDTLYAESVKGRFTISRDNAKTTLYLQMNSLRPEDTAVYYCTIGGSLSVS |
| | | SQGTLVTVSSSGGPGPAGMKGLPGStfkfympkkatelkhlqcleeelkpleevlnlaqsknfhlrpr |
| | | dlisninvivlelkgsettfmceyadetativeflnrwitfcqsiistltGGssstkktqlqlehllldlqmilnginnyknpkl |
| | | trmlSGGPGPAGMKGLPGSEVQLVESGGGLVQPGNSLRLSCAASGFTFSKFGMS |
| | | WVRQAPGKGLEWVSSISGSGRDTLYAESVKGRFTISRDNAKTTLYLQMNSLR |
| | | PEDTAVYYCTIGGSLSVSSQGTLVTVSSggggsggggsggggsggggsggggsggggsSGGP |
| | | GPAGMKGLPGSEVQLVESGGGLVQPGGSLRLSCAASGFTFSSYTLAWVRQAP |
| | | GKGLEWVAAIDSSSYTYSPDTVRGRFTISRDNAKNSLYLQMNSLRAEDTAVY |
| | | YCARDSNWDALDYWGQGTTVTVSSGGGGSGGGGSGGGGSDIQMTQSPSSLS |
| | | ASVGDRVTITCKASQNVGTNVGWYQQKPGKAPKALIYSASFRYSGVPSRFSGS |
| | | GSGTDFTLTISSLQPEDFATYYCQQYYTYPYTFGGGTKVEIKHHHHHH** |
| 387 | ACP308 | EVQLVESGGGLVQPGGSLRLSCAASGFTFSSYTLAWVRQAPGKGLEWVAAID |
| | | SSSYTYSPDTVRGRFTISRDNAKNSLYLQMNSLRAEDTAVYYCARDSNWDAL |
| | | DYWGQGTTVTVSSGGGGSGGGGSGGGGSDIQMTQSPSSLSASVGDRVTITCK |
| | | ASQNVGTNVGWYQQKPGKAPKALIYSASFRYSGVPSRFSGSGSGTDFTLTISSL |
| | | QPEDFATYYCQQYYTYPYTFGGGTKVEIKSGGPGPAGMKGLPGSggggsggggsg |
| | | gggsggggsggggsggggsEVQLVESGGGLVQPGNSLRLSCAASGFTFSKFGMSWVR |
| | | QAPGKGLEWVSSISGSGRDTLYAESVKGRFTISRDNAKTTLYLQMNSLRPEDT |
| | | AVYYCTIGGSLSVSSQGTLVTVSSSGGPGPAGMKGLPGStfkfympkkatelkhlqcleee |
| | | lkpleevlnlaqsknfhlrprdlisninvivlelkgsettfmceyadetativeflnrwitfcqsiistltGGssstkktqlqle |
| | | hllldlqmilnginnyknpkltrmlSGGPGPAGMKGLPGSEVQLVESGGGLVQPGNSLRLS |
| | | CAASGFTFSKFGMSWVRQAPGKGLEWVSSISGSGRDTLYAESVKGRFTISRDN |
| | | AKTTLYLQMNSLRPEDTAVYYCTIGGSLSVSSQGTLVTVSSHHHHHH** |
| 388 | ACP309 | aptssstkktqlqlehllldlqmilnginnyknpkltrmltfkfympkkatelkhlqcleeelkpleevlnlaqsknfhlrpr |
| | (WW0307) | dlisninvivlelkgsettfmceyadetativeflnrwitfcqsiistltSGGPGPAGMKGLPGSEVQLVES |
| | | GGGLVQPGNSLRLSCAASGFTFSKFGMSWVRQAPGKGLEWVSSISGSGRDTL |
| | | YAESVKGRFTISRDNAKTTLYLQMNSLRPEDTAVYYCTIGGSLSVSSQGTLVT |
| | | VSSggggsggggsggggsggggsggggsggggsSGGPGPAGMKGLPGSEVQLVESGGGLV |
| | | QPGGSLRLSCAASGFTFSSYTLAWVRQAPGKGLEWVAAIDSSSYTYSPDTVRG |
| | | RFTISRDNAKNSLYLQMNSLRAEDTAVYYCARDSNWDALDYWGQGTTVTVS |
| | | SGGGGSGGGGSGGGGSDIQMTQSPSSLSASVGDRVTITCKASQNVGTNVGWY |
| | | QQKPGKAPKSLIYSASFRYSGVPSRFSGSGSGTDFTLTISSLQPEDFATYYCQQY |
| | | YTYPYTFGGGTKVEIKHHHHHH** |
| 389 | ACP310 | aptssstkktqlqlehllldlqmilnginnyknpkltrmltfkfympkkatelkhlqcleeelkpleevlnlaqsknfhlrpr |
| | (WW0308) | dlisninvivlelkgsettfmceyadetativeflnrwitfcqsiistltSGGPGPAGMKGLPGSEVQLVES |
| | | GGGLVQPGNSLRLSCAASGFTFSKFGMSWVRQAPGKGLEWVSSISGSGRDTL |
| | | YAESVKGRFTISRDNAKTTLYLQMNSLRPEDTAVYYCTIGGSLSVSSQGTLVT |
| | | VSSggggsggggsggggsggggsggggsggggsSGGPGPAGMKGLPGSEVQLVESGGGLV |
| | | QPGGSLRLSCAASGFTFSSYTLAWVRQAPGKGLEWVAAIDSSSYTYSPDTVRG |
| | | RFTISRDNAKNSLYLQMNSLRAEDTAVYYCARDSNWDALDYWGQGTTVTVS |
| | | SGGGGSGGGGSGGGGSDIQMTQSPSSLSASVGDRVTITCKASQNVGTNVGWY |
| | | QQKPGQAPRLLIYSASFRYSGVPSRFSGSGSGTDFTLTISSLQPEDFATYYCQQY |
| | | YTYPYTFGGGTKVEIKHHHHHH** |
| 390 | ACP311 | aptssstkktqlqlehllldlqmilnginnyknpkltrmltfkfympkkatelkhlqcleeelkpleevlnlaqsknfhlrpr |
| | (WW0316) | dlisninvivlelkgsettfmceyadetativeflnrwitfcqsiistltSGGPGPAGMKGLPGSeskygppcpp |
| | | cpapefIggpsvflfppkpkdtlmisrtpevtcvvvdvsqedpevqfnwyvdgvevhnaktkpreeqfnstyrvvsvl |
| | | tvlhqdwlngkeykckvsnkglpssiektiskakgqprepqvytlppsqeemtknqvsltclvkgfypsdiavewesn |
| | | gqpennykttppvldsdgsfflysrltvdksrwqegnvfscsvmhealhiihytqkslslslgkggggsggggsggggs |
| | | ggggsggggsggggsSGGPGPAGMKGLPGSEVQLVESGGGLVQPGGSLRLSCAASG |
| | | FTFSSYTLAWVRQAPGKGLEWVAAIDSSSYTYSPDTVRGRFTISRDNAKNSLY |
| | | LQMNSLRAEDTAVYYCARDSNWDALDYWGQGTTVTVSSGGGGSGGGGSGG |
| | | GGSDIQMTQSPSSLSASVGDRVTITCKASQNVGTNVGWYQQKPGKAPKALIYS |
| | | ASFRYSGVPSRFSGSGSGTDFTLTISSLQPEDFATYYCQQYYTYPYTFGGGTKV |
| | | EIKHHHHHH** |
| 391 | ACP312 | eskygppcppcpapeflggpsvflfppkpkdtlmisrtpevtcvwdvsqedpevqfnwyvdgvevhnaktkpree |
| | (WW0317) | qfnstyrvvsvltvlhqdwlngkeykckvsnkglpssiektiskakgqprepqvytlppsqeemtknqvsltclvkgfy |
| | | psdiavewesngqpennykttppvldsdgsfflysrltvdksrwqegnvfscsvmhealhnhytqkslslslgkSGG |
| | | PGPAGMKGLPGSaptssstkktqlqlehllldlqmilnginnyknpkltrmltfkfympkkatelkhlqcleeel |
| | | kpleevlnlaqsknfhlrprdlisninvivlelkgsettfmceyadetativeflnrwitfcqsiistltggggsggggsgggg |
| | | sggggsggggsggggsSGGPGPAGMKGLPGSEVQLVESGGGLVQPGGSLRLSCAASG |
| | | FTFSSYTLAWVRQAPGKGLEWVAAIDSSSYTYSPDTVRGRFTISRDNAKNSLY |
| | | LQMNSLRAEDTAVYYCARDSNWDALDYWGQGTTVTVSSGGGGSGGGGSGG |
| | | GGSDIQMTQSPSSLSASVGDRVTITCKASQNVGTNVGWYQQKPGKAPKALIYS |
| | | ASFRYSGVPSRFSGSGSGTDFTLTISSLQPEDFATYYCQQYYTYPYTFGGGTKV |
| | | EIKHHHHHH** |
| 392 | ACP313 | aptssstkktqlqlehllldlqmilnginnyknpkltrmltfkfympkkatelkhlqcleeelkpleevlnlaqsknfhlrpr |
| | (WW0318) | dlisninvivlelkgsettfmceyadetativeflnrwitfcqsiistltSGGPGPAGMKGLPGSggggsggggs |
| | | ggggsggggsggggsggggsEVQLVESGGGLVQPGGSLRLSCAASGFTFSSYTLAWVR |
| | | QAPGKGLEWVAAIDSSSYTYSPDTVRGRFTISRDNAKNSLYLQMNSLRAEDTA |
| | | VYYCARDSNWDALDYWGQGTTVTVSSGGGGSGGGGSGGGGSDIQMTQSPSS |
| | | LSASVGDRVTITCKASQNVGTNVGWYQQKPGKAPKALIYSASFRYSGVPSRFS |
| | | GSGSGTDFTLTISSLQPEDFATYYCQQYYTYPYTFGGGTKVEIKSGGPGPAGM |
| | | KGLPGSeskygppcppcpapeflggpsvflfppkpkdtlmisrtpevtcvwdvsqedpevqfnwyvdgvevh |
| | | naktkpreeqfnstyrwsvltvlhqdwlngkeykckvsnkglpssiektiskakgqprepqvytlppsqeemtknqv |
| | | sltclvkgfypsdiavewesngqpennykttppvldsdgsfflysrltvdksrwqegnvfscsvmliealhnhytqkslsl |
| | | slgkHHHHHH** |
| 393 | ACP314 | vprdcgckpcictvpevssvfifppkpkdvltitltpkvtcvvvdiskddpevqfswfvddvevhtaqtqpreeqfnstf |
| | (WW0354) | rsvselpimhqdwlngkefkcrvnsaafpapiektisktkgrpkapqvytipppkeqmakdkvsltcmitdffpeditv |
| | | ewqwngqpaenykntqpimdtdgsyfvysklnvqksnweagntftcsvlheglhiihhtekslshspgkSGGPG |
| | | PAGMKGLPGSaptssstkktqlqlehllldlqmilngirmyknpkltrmltfkfympkkatelkhlqcleeelkple |
| | | evlnlaqsknfhlrprdlisninvivlelkgsettfmceyadetativeflnrwitfcqsiistltggggsggggsggggsgg |
| | | ggsggggsggggsSGGPGPAGMKGLPGSEVQLVESGGGLVQPGGSLRLSCAASGFT |
| | | FSSYTLAWVRQAPGKGLEWVAAIDSSSYTYSPDTVRGRFTISRDNAKNSLYLQ |
| | | MNSLRAEDTAVYYCARDSNWDALDYWGQGTTVTVSSGGGGSGGGGSGGGG |
| | | SDIQMTQSPSSLSASVGDRVTITCKASQNVGTNVGWYQQKPGKAPKALIYSAS |
| | | FRYSGVPSRFSGSGSGTDFTLTISSLQPEDFATYYCQQYYTYPYTFGGGTKVEI |
| | | KHHHHHH** |
| 394 | ACP336 | aptssstkktqlqlehllldlqmilnginnyknpkltrmltfkfympkkatelkhlqcleeelkpleevlnlaqsknfhlrpr |
| | (WW0414) | dlisninvivlelkgsettfmceyadetativeflnrwitfcqsiistltsggpGPAGLYAQpgsEVQLVESGG |
| | | GLVQPGNSLRLSCAASGFTFSKFGMSWVRQAPGKGLEWVSSISGSGRDTLYA |
| | | ESVKGRFTISRDNAKTTLYLQMNSLRPEDTAVYYCTIGGSLSVSSQGTLVTVSS |
| | | ggggsggggsggggsggggsggggsggggssggpGPAGLYAQpgsEVQLVESGGGLVQPGGS |
| | | LRLSCAASGFTFSSYTLAWVRQAPGKGLEWVAAIDSSSYTYSPDTVRGRFTISR |
| | | DNAKNSLYLQMNSLRAEDTAVYYCARDSNWDALDYWGQGTTVTVSSsggpG |
| | | PAGLYAQpgsDIQMTQSPSSLSASVGDRVTITCKAREKLWSAVAWYQQKPGKA |
| | | PKsLIYSASFRYSGVPSRFSGSGSGTDFTLTISSLQPEDFATYYCQQYYTYPYTF |
| | | GGGTKVEIK** |
| 395 | ACP337 | aptssstkktqlqlehllldlqmilnginnyknpkltrmltfkfympkkatelkhlqcleeelkpleevlnlaqsknfhlrpr |
| | (WW0415) | dlisninvivlelkgsettfmceyadetativeflnrwitfcqsiistltsggpGPAGLYAQpgsEVQLVESGG |
| | | GLVQPGNSLRLSCAASGFTFSKFGMSWVRQAPGKGLEWVSSISGSGRDTLYA |
| | | ESVKGRFTISRDNAKTTLYLQMNSLRPEDTAVYYCTIGGSLSVSSQGTLVTVSS |
| | | ggggsggggsggggsggggsggggsggggssggpGPAGLYAQpgsEVQLVESGGGLVQPGGS |
| | | LRLSCAASGFTFSSYTLAWVRQAPGKGLEWVAAIDSSSYTYSPDTVRGRFTISR |
| | | DNAKNSLYLQMNSLRAEDTAVYYCARDSNWDALDYWGQGTTVTVSSGGGG |
| | | SGGGGSGGGGSDIQMTQSPSSLSASVGDRVTITCKAREKLWSAVAWYQQKPG |
| | | KAPKsLIYSASFRYSGVPSRFSGSGSGTDFTLTISSLQPEDFATYYCQQYYTYPY |
| | | TFGGGTKVEIK** |
| 396 | ACP338 | aptssstkktqlqlehllldlqmilnginnyknpkltrmltfkfympkkatelkhlqcleeelkpleevlnlaqsknfhlrpr |
| | (WW0416) | dlisninvivlelkgsettfmceyadetativeflnrwitfcqsiistltsggpGPAGLYAQpgsEVQLVESGG |
| | | GLVQPGNSLRLSCAASGFTFSKFGMSWVRQAPGKGLEWVSSISGSGRDTLYA |
| | | ESVKGRFTISRDNAKTTLYLQMNSLRPEDTAVYYCTIGGSLSVSSQGTLVTVSS |
| | | ggggsggggsggggsggggsggggsggggssggpGPAGLYAQpgsEVQLVESGGGLVQPGGS |
| | | LRLSCAASGFTFSSYTLAWVRQAPGKGLEWVAAIDSSSYTYSPDTVRGRFTISR |
| | | DNAKNSLYLQMNSLRAEDTAVYYCARDSNWDALDYWGQGTTVTVSSsggpG |
| | | PAGLYAQpgsDIQMTQSPSSLSASVGDRVTITCKVTEKVWGNVAWYQQKPGK |
| | | APISLIYSPSLRKSGVPSRFSGSGSGTDFTLTISSLQPEDFATYYCQQYYTYPYTF |
| | | GGGTKVEIK** |
| 397 | ACP339 | aptssstkktqlqlehllldlqmilnginnyknpkltrmltfkfympkkatelkhlqcleeelkpleevlnlaqsknfhlrpr |
| | (WW0417) | dlisninvivlelkgsettfmceyadetativeflnrwitfcqsiistltsggpGPAGLYAQpgsEVQLVESGG |
| | | GLVQPGNSLRLSCAASGFTFSKFGMSWVRQAPGKGLEWVSSISGSGRDTLYA |
| | | ESVKGRFTISRDNAKTTLYLQMNSLRPEDTAVYYCTIGGSLSVSSQGTLVTVSS |
| | | ggggsggggsggggsggggsggggsggggssggpGPAGLYAQpgsEVQLVESGGGLVQPGGS |
| | | LRLSCAASGFTFSSYTLAWVRQAPGKGLEWVAAIDSSSYTYSPDTVRGRFTISR |
| | | DNAKNSLYLQMNSLRAEDTAVYYCARDSNWDALDYWGQGTTVTVSSGGGG |
| | | SGGGGSGGGGSDIQMTQSPSSLSASVGDRVTITCKVTEKVWGNVAWYQQKP |
| | | GKAPISLIYSPSLRKSGVPSRFSGSGSGTDFTLTISSLQPEDFATYYCQQYYTYP |
| | | YTFGGGTKVEIK** |
| 398 | ACP340 | aptssstkktqlqlehllldlqmilnginnyknpkltrmltfkfympkkatelkhlqcleeelkpleevlnlaqsknfhlrpr |
| | (WW0418) | dlisninvivlelkgsettfmceyadetativeflnrwitfcqsiistltsggpGPAGLYAQpgsEVQLVESGG |
| | | GLVQPGNSLRLSCAASGFTFSKFGMSWVRQAPGKGLEWVSSISGSGRDTLYA |
| | | ESVKGRFTISRDNAKTTLYLQMNSLRPEDTAVYYCTIGGSLSVSSQGTLVTVSS |
| | | ggggsggggsggggsggggsggggsggggssggpGPAGLYAQpgsevqllesggglvqpggslrlscaasgsi |
| | | fsanamgwyrqapgkglelvavissggstnyadsvkgrftisrdnskntvylqmnslraedtavyycmysgsyyytp |
| | | ndywgqgtlvtvss** |
| 399 | ACP341 | aptssstkktqlqlehllldlqmilnginnyknpkltrmltfkfympkkatelkhlqcleeelkpleevlnlaqsknfhlrpr |
| | (WW0419) | dlisninvivlelkgsettfmceyadetativeflnrwitfcqsiistltsggpGPAGLYAQpgsEVQLVESGG |
| | | GLVQPGNSLRLSCAASGFTFSKFGMSWVRQAPGKGLEWVSSISGSGRDTLYA |
| | | ESVKGRFTISRDNAKTTLYLQMNSLRPEDTAVYYCTIGGSLSVSSQGTLVTVSS |
| | | ggggsggggsggggsggggsggggsggggssggpGPAGLYAQpgsevqllesggglvqpggslrlscaaseri |
| | | fstdvmgwyrqapgkqrelvavvsargttnyldavkgrftisrdnskntlylqmnslraedtavyycyvrettspwriy |
| | | wgqgtlvtvss** |
| 400 | ACP342 | elcdddppeiphatfkamaykegtmlnceckrgfrriksgslymlctgnsshsswdnqcqctssatrnttkqvtpqpee |
| | (WW0420) | qkerkttemqspmqpvdqaslpghcrepppweneateriylrfwgqmvyyqcvqgyralhrgpaesvckmthgk |
| | | trwtqpqlictgemetsqfpgeekpqaspegrpesetsSlvtttdfqiqtemaatmetsiftteyqggggsggggsgggg |
| | | sggggsggggsggggssggpGPAGLYAQpgsaptssstkktqlqlehllldlqmlnginnyknpkltrmltfkfy |
| | | mpkkatelkhlqcleeelkpleevlnlaqsknfhlrprdlisninvivlelkgsettfmceyadetativeflnrwitfcqsii |
| | | stltsggpGPAGLYAQpgsEVQLVESGGGLVQPGNSLRLSCAASGFTFSKFGMSWV |
| | | RQAPGKGLEWVSSISGSGRDTLYAESVKGRFTISRDNAKTTLYLQMNSLRPED |
| | | TAVYYCTIGGSLSVSSQGTLVTVSSggggsggggsggggsggggsggggsggggssggpGPAG |
| | | LYAQpgsEVQLVESGGGLVQPGGSLRLSCAASGFTFSSYTLAWVRQAPGKGLE |
| | | WVAAIDSSSYTYSPDTVRGRFTISRDNAKNSLYLQMNSLRAEDTAVYYCARD |
| | | SNWDALDYWGQGTTVTVSSsggpGPAGLYAQpgsDIQMTQSPSSLSASVGDRVT |
| | | ITCKAREKLWSAVAWYQQKPGKAPKsLIYSASFRYSGVPSRFSGSGSGTDFTLT |
| | | ISSLQPEDFATYYCQQYYTYPYTFGGGTKVEIK** |
| 401 | ACP343 | elcdddppeiphatfkamaykegtmlnceckrgfrriksgslymlctgnsshsswdnqcqctssatrnttkqvtpqpee |
| | (WW0421) | qkerkttemqspmqpvdqaslpghcrepppweneateriylrfwgqmvyyqcvqgyralhrgpaesvckmthgk |
| | | trwtqpqlictgemetsqfpgeekpqaspegrpesetsSlvtttdfqiqtemaatmetsiftteyqggggsggggsgggg |
| | | sggggsggggsggggssggpGPAGLYAQpgsaptssstkktqlqlehllldlqmlnginnyknpkltrmltfkfy |
| | | mpkkatelkhlqcleeelkpleevlnlaqsknfhlrprdlisninvivlelkgsettfmceyadetativeflnrwitfcqsii |
| | | stltsggpGPAGLYAQpgsEVQLVESGGGLVQPGNSLRLSCAASGFTFSKFGMSWV |
| | | RQAPGKGLEWVSSISGSGRDTLYAESVKGRFTISRDNAKTTLYLQMNSLRPED |
| | | TAVYYCTIGGSLSVSSQGTLVTVSSggggsggggsggggsggggsggggsggggssggpGPAG |
| | | LYAQpgsEVQLVESGGGLVQPGGSLRLSCAASGFTFSSYTLAWVRQAPGKGLE |
| | | WVAAIDSSSYTYSPDTVRGRFTISRDNAKNSLYLQMNSLRAEDTAVYYCARD |
| | | SNWDALDYWGQGTTVTVSSGGGGSGGGGSGGGGSDIQMTQSPSSLSASVGD |
| | | RVTITCKAREKLWSAVAWYQQKPGKAPKsLIYSASFRYSGVPSRFSGSGSGTD |
| | | FTLTISSLQPEDFATYYCQQYYTYPYTFGGGTKVEIK** |
| 402 | ACP344 | elcdddppeiphatfkamaykegtmlnceckrgfrriksgslymlctgnsshsswdnqcqctssatrnttkqvtpqpee |
| | (WW0422) | qkerkttemqspmqpvdqaslpghcrepppweneateriylrfwgqmvyyqcvqgyralhrgpaesvckmthgk |
| | | trwtqpqlictgemetsqfpgeekpqaspegrpesetsSlvtttdfqiqtemaatmetsiftteyqggggsggggsgggg |
| | | sggggsggggsggggssggpGPAGLYAQpgsaptssstkktqlqlehllldlqmilnginnyknpkltrmltfkfy |
| | | mpkkatelkhlqcleeelkpleevlnlaqsknfhlrprdlisninvivlelkgsettfmceyadetativeflnrwitfcqsii |
| | | stltsggpGPAGLYAQpgsEVQLVESGGGLVQPGNSLRLSCAASGFTFSKFGMSWV |
| | | RQAPGKGLEWVSSISGSGRDTLYAESVKGRFTISRDNAKTTLYLQMNSLRPED |
| | | TAVYYCTIGGSLSVSSQGTLVTVSSggggsggggsggggsggggsggggsggggssggpGPAG |
| | | LYAQpgsEVQLVESGGGLVQPGGSLRLSCAASGFTFSSYTLAWVRQAPGKGLE |
| | | WVAAIDSSSYTYSPDTVRGRFTISRDNAKNSLYLQMNSLRAEDTAVYYCARD |
| | | SNWDALDYWGQGTTVTVSSsggpGPAGLYAQpgsDIQMTQSPSSLSASVGDRVT |
| | | ITCKVTEKVWGNVAWYQQKPGKAPISLIYSPSLRKSGVPSRFSGSGSGTDFTLT |
| | | ISSLQPEDFATYYCQQYYTYPYTFGGGTKVEIK** |
| 403 | ACP345 | elcdddppeiphatfkamaykegtmlnceckrgfrriksgslymlctgnsshsswdnqcqctssatrnttkqvtpqpee |
| | (WW0423) | qkerkttemqspmqpvdqaslpghcrepppweneateriylrfwgqmvyyqcvqgyralhrgpaesvckmthgk |
| | | trwtqpqlictgemetsqfpgeekpqaspegrpesetsSlvtttdfqiqtemaatmetsiftteyqggggsggggsgggg |
| | | sggggsggggsggggSSggpGPAGLYAQpgsaptssstkktqlqlehllldlqmilnginnyknpkltrmltfkfy |
| | | mpkkatelkhlqcleeelkpleevlnlaqsknfhlrprdlisninvivlelkgsettfmceyadetativeflnrwitfcqsii |
| | | stltsggpGPAGLYAQpgsEVQLVESGGGLVQPGNSLRLSCAASGFTFSKFGMSWV |
| | | RQAPGKGLEWVSSISGSGRDTLYAESVKGRFTISRDNAKTTLYLQMNSLRPED |
| | | TAVYYCTIGGSLSVSSQGTLVTVSSggggsggggsggggsggggsggggsggggssggpGPAG |
| | | LYAQpgsEVQLVESGGGLVQPGGSLRLSCAASGFTFSSYTLAWVRQAPGKGLE |
| | | WVAAIDSSSYTYSPDTVRGRFTISRDNAKNSLYLQMNSLRAEDTAVYYCARD |
| | | SNWDALDYWGQGTTVTVSSGGGGSGGGGSGGGGSDIQMTQSPSSLSASVGD |
| | | RVTITCKVTEKVWGNVAWYQQKPGKAPISLIYSPSLRKSGVPSRFSGSGSGTD |
| | | FTLTISSLQPEDFATYYCQQYYTYPYTFGGGTKVEIK** |
| 404 | ACP346 | elcdddppeiphatfkamaykegtmlnceckrgfrriksgslymlctgnsshsswdnqcqctssatrnttkqvtpqpee |
| | (WW0424) | qkerkttemqspmqpvdqaslpghcrepppweneateriylrfwgqmvyyqcvqgyralhrgpaesvckmthgk |
| | | trwtqpqlictgemetsqfpgeekpqaspegrpesetsSlvtttdfqiqtemaatmetsiftteyqggggsggggsgggg |
| | | sggggsggggsggggssggpGPAGLYAQpgsaptssstkktqlqlehllldlqmilnginnyknpkltrmltfkfy |
| | | mpkkatelkhlqcleeelkpleevlnlaqsknfhlrprdlisninvivlelkgsettfmceyadetativeflnrwitfcqsii |
| | | stltsggpGPAGLYAQpgsEVQLVESGGGLVQPGNSLRLSCAASGFTFSKFGMSWV |
| | | RQAPGKGLEWVSSISGSGRDTLYAESVKGRFTISRDNAKTTLYLQMNSLRPED |
| | | TAVYYCTIGGSLSVSSQGTLVTVSSggggsggggsggggsggggsggggsggggssggpGPAG |
| | | LYAQpgsevqllesggglvqpggslrlscaasgsifsanamgwyrqapgkglelvavissggstnyadsvkgrftisr |
| | | dnskntvylqmnslraedtavyycmysgsyyytpndywgqgtlvtvss** |
| 405 | ACP347 | elcdddppeiphatfkamaykegtmlnceckrgfrriksgslymlctgnsshsswdnqcqctssatrnttkqvtpqpee |
| | (WW0425) | qkerkttemqspmqpvdqaslpghcrepppweneateriylrfwgqmvyyqcvqgyralhrgpaesvckmthgk |
| | | trwtqpqlictgemetsqfpgeekpqaspegrpesetsSlvtttdfqiqtemaatmetsiftteyqggggsggggsgggg |
| | | sggggsggggsggggssggpGPAGLYAQpgsaptssstkktqlqlehllldlqmilnginnyknpkltrmltfkfy |
| | | mpkkatelkhlqcleeelkpleevlnlaqsknfhlrprdlisninvivlelkgsettfmceyadetativeflnrwitfcqsii |
| | | stltsggpGPAGLYAQpgsEVQLVESGGGLVQPGNSLRLSCAASGFTFSKFGMSWV |
| | | RQAPGKGLEWVSSISGSGRDTLYAESVKGRFTISRDNAKTTLYLQMNSLRPED |
| | | TAVYYCTIGGSLSVSSQGTLVTVSSggggsggggsggggsggggsggggsggggssggpGPAG |
| | | LYAQpgsevqllesggglvqpggslrlscaaserifstdvmgwyrqapgkqrelvavvsargttnyldavkgrftisrd |
| | | nskntlylqmnslraedtavyycyvrettspwriywgqgtlvtvss** |
| 406 | ACP348 | eskygppcppcpapeflggpsvflfppkpkdtlmisrtpevtcvwdvsqedpevqfnwyvdgvevhnaktkpree |
| | (WW0426) | qfnstyrvvsvltvlhqdwlngkeykckvsnkglpssiektiskakgqprepqvytlppsqeemtknqvsltclvkgfy |
| | | psdiavewesngqpennykttppvldsdgsfflysrltvdksrwqegnvfscsvmhealhnhytqkslslslgksggp |
| | | GPAGLYAQpgsaptssstkktqlqlehllldlqmilnginnyknpkltrmltfkfympkkatelkhlqcleeelkpl |
| | | eevlnlaqsknfhlrprdlisninvivlelkgsettfmceyadetativeflnrwitfcqsiistltggggsggggsggggsgg |
| | | ggsggggsggggssggpGPAGLYAQpgsEVQLVESGGGLVQPGGSLRLSCAASGFTFS |
| | | SYTLAWVRQAPGKGLEWVAAIDSSSYTYSPDTVRGRFTISRDNAKNSLYLQM |
| | | NSLRAEDTAVYYCARDSNWDALDYWGQGTTVTVSSsggpGPAGLYAQpgsDIQ |
| | | MTQSPSSLSASVGDRVTITCKAREKLWSAVAWYQQKPGKAPKsLIYSASFRYS |
| | | GVPSRFSGSGSGTDFTLTISSLQPEDFATYYCQQYYTYPYTFGGGTKVEIK** |
| 407 | ACP349 | eskygppcppcpapeflggpsvflfppkpkdtlmisrtpevtcvwdvsqedpevqfnwyvdgvevhnaktkpree |
| | (WW0427) | qfnstyrvvsvltvlhqdwlngkeykckvsnkglpssiektiskakgqprepqvytlppsqeemtknqvsltclvkgfy |
| | | psdiavewesngqpennykttppvldsdgsfflysrltvdksrwqegnvfscsvmhealhnhytqkslslslgksggp |
| | | GPAGLYAQpgsaptssstkktqlqlehllldlqmilnginnyknpkltrmltfkfympkkatelkhlqcleeelkpl |
| | | eevlnlaqsknfhlrprdlisninvivlelkgsettfmceyadetativeflnrwitfcqsiistltggggsggggsggggsgg |
| | | ggsggggsggggssggpGPAGLYAQpgsEVQLVESGGGLVQPGGSLRLSCAASGFTFS |
| | | SYTLAWVRQAPGKGLEWVAAIDSSSYTYSPDTVRGRFTISRDNAKNSLYLQM |
| | | NSLRAEDTAVYYCARDSNWDALDYWGQGTTVTVSSGGGGSGGGGSGGGGS |
| | | DIQMTQSPSSLSASVGDRVTITCKAREKLWSAVAWYQQKPGKAPKsLIYSASF |
| | | RYSGVPSRFSGSGSGTDFTLTISSLQPEDFATYYCQQYYTYPYTFGGGTKVEIK |
| | | ** |
| 408 | ACP350 | eskygppcppcpapeflggpsvflfppkpkdtlmisrtpevtcvwdvsqedpevqfnwyvdgvevhnaktkpree |
| | (WW0428) | qfnstyrvvsvltvlhqdwlngkeykckvsnkglpssiektiskakgqprepqvytlppsqeemtknqvsltclvkgfy |
| | | psdiavewesngqpennykttppvldsdgsfflysrltvdksrwqegnvfscsvmhealhnhytqkslslslgksggp |
| | | GPAGLYAQpgsaptssstkktqlqlehllldlqmilnginnyknpkltrmltfkfympkkatelkhlqcleeelkpl |
| | | eevlnlaqsknfhlrprdlisninvivlelkgsettfmceyadetativeflnrwitfcqsiistltggggsggggsggggsgg |
| | | ggsggggsggggSSggpGPAGLYAQpgsEVQLVESGGGLVQPGGSLRLSCAASGFTFS |
| | | SYTLAWVRQAPGKGLEWVAAIDSSSYTYSPDTVRGRFTISRDNAKNSLYLQM |
| | | NSLRAEDTAVYYCARDSNWDALDYWGQGTTVTVSSsggpGPAGLYAQpgsDIQ |
| | | MTQSPSSLSASVGDRVTITCKVTEKVWGNVAWYQQKPGKAPISLIYSPSLRKS |
| | | GVPSRFSGSGSGTDFTLTISSLQPEDFATYYCQQYYTYPYTFGGGTKVEIK** |
| 409 | ACP351 | eskygppcppcpapeflggpsvflfppkpkdtlmisrtpevtcvwdvsqedpevqfnwyvdgvevlmaktkpree |
| | (WW0429) | qfnstyrvvsvltvlhqdwlngkeykckvsnkglpssiektiskakgqprepqvytlppsqeemtknqvsltclvkgfy |
| | | psdiavewesngqpennykttppvldsdgsfflysrltvdksrwqegnvfscsvmhealhnhytqkslslslgksggp |
| | | GPAGLYAQpgsaptssstkktqlqlehllldlqmilnginnyknpkltrmltfkfympkkatelkhlqcleeelkpl |
| | | eevlnlaqsknfhlrprdlisninvivlelkgsettfmceyadetativeflnrwitfcqsiistltggggsggggsggggsgg |
| | | ggsggggsggggssggpGPAGLYAQpgsEVQLVESGGGLVQPGGSLRLSCAASGFTFS |
| | | SYTLAWVRQAPGKGLEWVAAIDSSSYTYSPDTVRGRFTISRDNAKNSLYLQM |
| | | NSLRAEDTAVYYCARDSNWDALDYWGQGTTVTVSSGGGGSGGGGSGGGGS |
| | | DIQMTQSPSSLSASVGDRVTITCKVTEKVWGNVAWYQQKPGKAPISLIYSPSL |
| | | RKSGVPSRFSGSGSGTDFTLTISSLQPEDFATYYCQQYYTYPYTFGGGTKVEIK |
| | | ** |
| 410 | ACP352 | eskygppcppcpapeflggpsvflfppkpkdtlmisrtpevtcvwdvsqedpevqfnwyvdgvevlmaktkpree |
| | (WW0430) | qfnstyrvvsvltvlhqdwlngkeykckvsnkglpssiektiskakgqprepqvytlppsqeemtknqvsltclvkgfy |
| | | psdiavewesngqpennykttppvldsdgsfflysrltvdksrwqegnvfscsvmhealhnhytqkslslslgksggp |
| | | GPAGLYAQpgsaptssstkktqlqlehllldlqmilnginnyknpkltrmltfkfympkkatelkhlqcleeelkpl |
| | | eevlnlaqsknfhlrprdlisninvivlelkgsettfmceyadetativeflnrwitfcqsiistltggggsggggsggggsgg |
| | | ggsggggsggggssggpGPAGLYAQpgsevqllesggglvqpggslrlscaasgsifsanamgwyrqapgkgl |
| | | elvavissggstnyadsvkgrftisrdnskntvylqnuislraedtavyycmysgsyyytpndywgqgtlvtvss** |
| 411 | ACP353 | eskygppcppcpapeflggpsvflfppkpkdtlmisrtpevtcvwdvsqedpevqfnwyvdgvevlmaktkpree |
| | (WW0431) | qfnstyrvvsvltvlhqdwlngkeykckvsnkglpssiektiskakgqprepqvytlppsqeemtknqvsltclvkgfy |
| | | psdiavewesngqpennykttppvldsdgsfflysrltvdksrwqegnvfscsvmheallinliytqkslslslgksggp |
| | | GPAGLYAQpgsaptssstkktqlqlehllldlqmilnginnyknpkltrmltfkfympkkatelkhlqcleeelkpl |
| | | eevlnlaqsknfhlrprdlisninvivlelkgsettfmceyadetativeflnrwitfcqsiistltggggsggggsggggsgg |
| | | ggsggggsggggssggpGPAGLYAQpgsevqllesggglvqpggslrlscaaserifstdvmgwyrqapgkqr |
| | | elvawsargttnyldavkgrftisrdnskntlylqmnslraedtavyycyvrettspwriywgqgtlvtvss** |
| 412 | ACP354 | eskygppcppcpapeflggpsvflfppkpkdtlmisrtpevtcvwdvsqedpevqfnwyvdgvevlmaktkpree |
| | (WW0432) | qfnstyrvvsvltvlhqdwlngkeykckvsnkglpssiektiskakgqprepqvytlppsqeemtknqvsltclvkgfy |
| | | psdiavewesngqpennykttppvldsdgsfflysrltvdksrwqegnvfscsvmheallinliytqkslslslgksggp |
| | | GPAGLYAQpgselcdddppeiphatfkamaykegtmlnceckrgfrriksgslymlctgnsshsswdnqcqcts |
| | | satnittkqvtpqpeeqkerkttemqspmqpvdqaslpghcrepppweneateriyhlvvgqmvyyqcvqgyralh |
| | | rgpaesvckmthgktrwtqpqlictgemetsqfpgeekpqaspegrpesetsSlvtttdfqiqtemaatmetsiftteyq |
| | | ggggsggggsggggsggggsggggsggggssggpGPAGLYAQpgsaptssstkktqlqlehllldlqmilngin |
| | | nyknpkltrmltfkfympkkatelkhlqcleeelkpleevlnlaqsknfhlrprdlisninvivlelkgsettfmceyadet |
| | | ativeflnrwitfcqsiistltggggsggggsggggsggggsggggsggggssggpGPAGLYAQpgsEVQLV |
| | | ESGGGLVQPGGSLRLSCAASGFTFSSYTLAWVRQAPGKGLEWVAAIDSSSYTY |
| | | SPDTVRGRFTISRDNAKNSLYLQMNSLRAEDTAVYYCARDSNWDALDYWGQ |
| | | GTTVTVSSsggpGPAGLYAQpgsDIQMTQSPSSLSASVGDRVTITCKAREKLWSA |
| | | VAWYQQKPGKAPKsLIYSASFRYSGVPSRFSGSGSGTDFTLTISSLQPEDFATY |
| | | YCQQYYTYPYTFGGGTKVEIK** |
| 413 | ACP355 | eskygppcppcpapeflggpsvflfppkpkdtlmisrtpevtcvvvdvsqedpevqfnwyvdgvevlmaktkpree |
| | (WW0433) | qfnstyrvvsvltvlhqdwlngkeykckvsnkglpssiektiskakgqprepqvytlppsqeemtknqvsltclvkgfy |
| | | psdiavewesngqpennykttppvldsdgsfflysrltvdksrwqegnvfscsvmhealhnhytqkslslslgksggp |
| | | GPAGLYAQpgselcdddppeiphatfkamaykegtmlnceckrgfrriksgslymlctgnsshsswdnqcqcts |
| | | satnittkqvtpqpeeqkerkttemqspmqpvdqaslpghcrepppweneateriyhlvvgqmvyyqcvqgyralh |
| | | rgpaesvckmthgktrwtqpqlictgemetsqfpgeekpqaspegrpesetsSlvtttdfqiqtemaatmetsiftteyq |
| | | ggggsggggsggggsggggsggggsggggssggpGPAGLYAQpgsaptssstkktqlqlehllldlqmilngin |
| | | nyknpkltrmltfkfympkkatelkhlqcleeelkpleevlnlaqsknfhlrprdlisninvivlelkgsettfmceyadet |
| | | ativeflnrwitfcqsiistltggggsggggsggggsggggsggggsggggssggpGPAGLYAQpgsEVQLV |
| | | ESGGGLVQPGGSLRLSCAASGFTFSSYTLAWVRQAPGKGLEWVAAIDSSSYTY |
| | | SPDTVRGRFTISRDNAKNSLYLQMNSLRAEDTAVYYCARDSNWDALDYWGQ |
| | | GTTVTVSSGGGGSGGGGSGGGGSDIQMTQSPSSLSASVGDRVTITCKAREKLW |
| | | SAVAWYQQKPGKAPKsLIYSASFRYSGVPSRFSGSGSGTDFTLTISSLQPEDFAT |
| | | YYCQQYYTYPYTFGGGTKVEIK** |
| 414 | ACP356 | eskygppeppcpapeflggpsvflfppkpkdtlmisrtpevtcvvvdvsqedpevqfnwyvdgvevhnaktkpree |
| | (WW0434) | qfnstyrvvsvltvlhqdwlngkeykckvsnkglpssiektiskakgqprepqvytlppsqeemtknqvsltclvkgfy |
| | | psdiavewesngqpennykttppvldsdgsfflysrltvdksrwqegnvfscsvmhealhnhytqkslslslgksggp |
| | | GPAGLYAQpgselcdddppeiphatfkamaykegtmlnceckrgfrriksgslymlctgnsshsswdnqcqcts |
| | | satnittkqvtpqpeeqkerkttemqspmqpvdqaslpghcrepppweneateriyhlvvgqmvyyqcvqgyralh |
| | | rgpaesvckmthgktrwtqpqlictgemetsqfpgeekpqaspegrpesetsSlvtttdfqiqtemaatmetsiftteyq |
| | | ggggsggggsggggsggggsggggsggggssggpGPAGLYAQpgsaptssstkktqlqlehllldlqmilngin |
| | | nyknpkltrmltfkfympkkatelkhlqcleeelkpleevlnlaqsknfhlrprdlisninvivlelkgsettfmceyadet |
| | | ativeflnrwitfcqsiistltggggsggggsggggsggggsggggsggggssggpGPAGLYAQpgsEVQLV |
| | | ESGGGLVQPGGSLRLSCAASGFTFSSYTLAWVRQAPGKGLEWVAAIDSSSYTY |
| | | SPDTVRGRFTISRDNAKNSLYLQMNSLRAEDTAVYYCARDSNWDALDYWGQ |
| | | GTTVTVSSsggpGPAGLYAQpgsDIQMTQSPSSLSASVGDRVTITCKVTEKVWGN |
| | | VAWYQQKPGKAPISLIYSPSLRKSGVPSRFSGSGSGTDFTLTISSLQPEDFATYY |
| | | CQQYYTYPYTFGGGTKVEIK** |
| 415 | ACP357 | eskygppcppcpapeflggpsvflfppkpkdtlmisrtpevtcvvvdvsqedpevqfnwyvdgvevlmaktkpree |
| | (WW0435) | qfnstyrvvsvltvlhqdwlngkeykckvsnkglpssiektiskakgqprepqvytlppsqeemtknqvsltclvkgfy |
| | | psdiavewesngqpennykttppvldsdgsfflysrltvdksrwqegnvfscsvmhealhnhytqkslslslgksggp |
| | | GPAGLYAQpgselcdddppeiphatfkamaykegtmlnceckrgfrriksgslymlctgnsshsswdnqcqcts |
| | | satnittkqvtpqpeeqkerkttemqspmqpvdqaslpghcrepppweneateriyhlvvgqmvyyqcvqgyralh |
| | | rgpaesvckmthgktrwtqpqlictgemetsqfpgeekpqaspegrpesetsSlvtttdfqiqtemaatmetsiftteyq |
| | | ggggsggggsggggsggggsggggsggggssggpGPAGLYAQpgsaptssstkktqlqlehllldlqmilngin |
| | | nyknpkltrmltfkfympkkatelkhlqcleeelkpleevlnlaqsknfhlrprdlisninvivlelkgsettfmceyadet |
| | | ativeflnrwitfcqsiistltggggsggggsggggsggggsggggsggggssggpGPAGLYAQpgsEVQLV |
| | | ESGGGLVQPGGSLRLSCAASGFTFSSYTLAWVRQAPGKGLEWVAAIDSSSYTY |
| | | SPDTVRGRFTISRDNAKNSLYLQMNSLRAEDTAVYYCARDSNWDALDYWGQ |
| | | GTTVTVSSGGGGSGGGGSGGGGSDIQMTQSPSSLSASVGDRVTITCKVTEKV |
| | | WGNVAWYQQKPGKAPISLIYSPSLRKSGVPSRFSGSGSGTDFTLTISSLQPEDF |
| | | ATYYCQQYYTYPYTFGGGTKVEIK** |
| 416 | ACP358 | eskygppcppcpapeflggpsvflfppkpkdtlmisrtpevtcvvvdvsqedpevqfnwyvdgvevlmaktkpree |
| | (WW0436) | qfnstyrvvsvltvlhqdwlngkeykckvsnkglpssiektiskakgqprepqvytlppsqeemtknqvsltclvkgfy |
| | | psdiavewesngqpennykttppvldsdgsfflysrltvdksrwqegnvfscsvmheallinliytqkslslslgksggp |
| | | GPAGLYAQpgselcdddppeiphatfkamaykegtmlnceckrgfrriksgslymlctgnsshsswdnqcqcts |
| | | satnittkqvtpqpeeqkerkttemqspmqpvdqaslpghcrepppweneateriyhlvvgqmvyyqcvqgyralh |
| | | rgpaesvckmthgktrwtqpqlictgemetsqfpgeekpqaspegrpesetsSlvtttdfqiqtemaatmetsiftteyq |
| | | ggggsggggsggggsggggsggggsggggssggpGPAGLYAQpgsaptssstkktqlqlehllldlqmilngin |
| | | nyknpkltrmltfkfympkkatelkhlqcleeelkpleevlnlaqsknfhlrprdlisninvivlelkgsettfmceyadet |
| | | ativeflnrwitfcqsiistltggggsggggsggggsggggsggggsggggssggpGPAGLYAQpgsevqllesg |
| | | gglvqpggslrlscaasgsifsanamgwyrqapgkglelvavissggstnyadsvkgrftisrdnskntvylqmnslrae |
| | | dtavyycmysgsyyytpndywgqgtlvtvss** |
| 417 | ACP359 | eskygppcppcpapeflggpsvflfppkpkdtlmisrtpevtcvvvdvsqedpevqfnwyvdgvevlmaktkpree |
| | (WW0437) | qfnstyrvvsvltvlhqdwlngkeykckvsnkglpssiektiskakgqprepqvytlppsqeemtknqvsltclvkgfy |
| | | psdiavewesngqpennykttppvldsdgsfflysrltvdksrwqegnvfscsvmheallinliytqkslslslgksggp |
| | | GPAGLYAQpgselcdddppeiphatfkamaykegtmlnceckrgfrriksgslymlctgnsshsswdnqcqcts |
| | | satnittkqvtpqpeeqkerkttemqspmqpvdqaslpghcrepppweneateriyhlvvgqmvyyqcvqgyralh |
| | | rgpaesvckmthgktrwtqpqlictgemetsqfpgeekpqaspegrpesetsSlvtttdfqiqtemaatmetsiftteyq |
| | | ggggsggggsggggsggggsggggsggggssggpGPAGLYAQpgsaptssstkktqlqlehllldlqmilngin |
| | | nyknpkltrmltfkfympkkatelkhlqcleeelkpleevlnlaqsknfhlrprdlisninvivlelkgsettfmceyadet |
| | | ativeflnrwitfcqsiistltggggsggggsggggsggggsggggsggggssggpGPAGLYAQpgsevqllesg |
| | | gglvqpggslrlscaaserifstdvmgwyrqapgkqrelvavvsargttnyldavkgrftisrdnskntlylqmnslraed |
| | | tavyycyvrettspwriywgqgtlvtvss** |
| 418 | ACP360 | EVQLVESGGGLVQPGGSLRLSCAASGFTFSSYTLAWVRQAPGKGLEWVAAID |
| | (WW0438) | SSSYTYSPDTVRGRFTISRDNAKNSLYLQMNSLRAEDTAVYYCARDSNWDAL |
| | | DYWGQGTTVTVSSggggsggggsggggsDIQMTQSPSSLSASVGDRVTITCKASQNV |
| | | GTNVGWYQQKPGKAPKsLIYSASFRYSGVPSRFSGSGSGTDFTLTISSLQPEDF |
| | | ATYYCQQYYTYPYTFGGGTKVEIKHHHHHH** |
| 419 | ACP361 | EVQLVESGGGLVQPGGSLRLSCAASGFTFSSYTLAWVRQAPGKGLEWVAAID |
| | (WW0439) | SSSYTYSPDTVRGRFTISRDNAKNSLYLQMNSLRAEDTAVYYCARDSNWDAL |
| | | DYWGQGTTVTVSSsggpGPAGLYAQpgsDIQMTQSPSSLSASVGDRVTITCKASQ |
| | | NVGTNVGWYQQKPGKAPKALIYSASFRYSGVPSRFSGSGSGTDFTLTISSLQPE |
| | | DFATYYCQQYYTYPYTFGGGTKVEIKHHHHHH** |
| 420 | ACP362 | EVQLVESGGGLVQPGGSLRLSCAASGFTFSSYTLAWVRQAPGKGLEWVAAID |
| | (WW0440) | SSSYTYSPDTVRGRFTISRDNAKNSLYLQMNSLRAEDTAVYYCARDSNWDAL |
| | | DYWGQGTTVTVSSsggpGPAGLYAQpgsDIQMTQSPSSLSASVGDRVTITCKASQ |
| | | NVGTNVGWYQQKPGKAPKsLIYSASFRYSGVPSRFSGSGSGTDFTLTISSLQPE |
| | | DFATYYCQQYYTYPYTFGGGTKVEIKHHHHHH** |
| 421 | ACP200 | lveepknlvktncdlyeklgeygfqnailviytqkapqvstptlveaarnlgrvgtkcctlpedqrlpcvedylsailnrvcl |
| | | lhektpvsehvtkccsgslverrpcfsaltvdetyvpkefkaetftfhsdictlpekekqikkqtalaelvkhkpkataeqlk |
| | | tvmddfaqfldtcckaadkdtcfstegpnlvtrckdalaSGGPGPAGMKGLPGScdlpqthnlrnkraltllvq |
| | | mrrlsplsclkdrkdfgfpqekvdaqqikkaqaipvlseltqqilniftskdssaawnttlldsfcndlhqqlndlqgclmq |
| | | qvgvqefpltqedallavrkyfhritvylrekkhspcawewraevwralsssanvlgrlreekSGGPGPAGMK |
| | | GLPGSlveepknlvktncdlyeklgeygfqnailvrytqkapqvstptlveaarnlgrvgtkcctlpedqrlpcvedyl |
| | | sailnrvcllhektpvsehvtkccsgslverrpcfsaltvdetyvpkefkaetftfhsdictlpekekqikkqtalaelvkhkp |
| | | kataeqlktvmddfaqfldtcckaadkdtcfstegpnlvtrckdalaHHHHHH** |
| 422 | ACP201 | eahkseiahiyndlgeqhfkglvliafsqylqkcsydehaklvqevtdfaktcvadesaancdkslhtlfgdklcaipnlr |
| | | enygeladcctkqepernecflqhkddnpslppferpeaeamctsfkenpttfmghylhevarrhpyfyapellyyaeq |
| | | yneiltqccaeadkescltpkldgvkekalvssvrqGGGGSGGGGSGGSlveepknlvktncdlyeklgeygf |
| | | qnailviytqkapqvstptlveaarnlgrvgtkcctlpedqrlpcvedylsailnrvcllhektpvsehvtkccsgslverrp |
| | | cfsaltvdetyvpkefkaetftfhsdictlpekekqikkqtalaelvkhkpkataeqlktvmddfaqfldtcckaadkdtcf |
| | | stegpnlvtrckdalaSGGPGPAGMKGLPGScdlpqthnlrnkraltllvqmrrlsplsclkdrkdfgfpqekv |
| | | daqqikkaqaipvlseltqqilniftskdssaawnttlldsfcndlhqqlndlqgclmqqvgvqefpltqedallavrkyfh |
| | | ritvylrekkhspcawewraevwralsssanvlgrlreekSGGPGPAGMKGLPGSeahkseiahiyndlge |
| | | qhfkglvliafsqylqkcsydehaklvqevtdfaktcvadesaancdkslhtlfgdklcaipnlrenygeladcctkqepe |
| | | mecflqhkddnpslppferpeaeamctsfkenpttfmghylhevarrhpyfyapellyyaeqyneiltqccaeadkes |
| | | cltpkldgvkekalvssvrqGGGGSGGGGSGGSlveepknlvktncdlyeklgeygfqnailviytqkapqvs |
| | | tptlveaarnlgrvgtkcctlpedqrlpcvedylsailnrvcllhektpvsehvtkccsgslverrpcfsaltvdetyvpkefk |
| | | aetftfhsdictlpekekqikkqtalaelvkhkpkataeqlktvmddfaqfldtcckaadkdtcfstegpnlvtrckdalaH |
| | | HHHHH** |
| 423 | ACP202 | EVQLVESGGGLVQPGNSLRLSCAASGFTFSKFGMSWVRQAPGKGLEWVSSIS |
| | | GSGRDTLYAESVKGRFTISRDNAKTTLYLQMNSLRPEDTAVYYCTIGGSLSVS |
| | | SQGTLVTVSSggggsgggSGGPGPAGMKGLPGSggggsgggscdlpqthnlrnkraltllvqmrrls |
| | | plsclkdrkdfgfpqekvdaqqikkaqaipvlseltqqilniftskdssaawnttlldsfcndlhqqlndlqgclmqqvgv |
| | | qefpltqedallavrkyfhritvylrekkhspcawewraevwralsssanvlgrlreekggggsgggSGGPGPAG |
| | | MKGLPGSggggsgggsEVQLVESGGGLVQPGNSLRLSCAASGFTFSKFGMSWVR |
| | | QAPGKGLEWVSSISGSGRDTLYAESVKGRFTISRDNAKTTLYLQMNSLRPEDT |
| | | AVYYCTIGGSLSVSSQGTLVTVSSHHHHHH** |
| 424 | ACP203 | EVQLVESGGGLVQPGNSLRLSCAASGFTFSKFGMSWVRQAPGKGLEWVSSIS |
| | | GSGRDTLYAESVKGRFTISRDNAKTTLYLQMNSLRPEDTAVYYCTIGGSLSVS |
| | | SQGTLVTVSSsggpGPAGLYAQpgscdlpqthnlrnkraltllvqmrrlsplsclkdrkdfgfpqekvdaq |
| | | qikkaqaipvlseltqqilniftskdssaawnttlldsfcndlhqqlndlqgclmqqvgvqefpltqedallavrkyfhritv |
| | | ylrekkhspcawewraevwralsssanvlgrlreeksggpGPAGLYAQpgsEVQLVESGGGLVQP |
| | | GNSLRLSCAASGFTFSKFGMSWVRQAPGKGLEWVSSISGSGRDTLYAESVKG |
| | | RFTISRDNAKTTLYLQMNSLRPEDTAVYYCTIGGSLSVSSQGTLVTVSS** |
| 425 | ACP204 | EVQLVESGGGLVQPGNSLRLSCAASGFTFSKFGMSWVRQAPGKGLEWVSSIS |
| | | GSGRDTLYAESVKGRFTISRDNAKTTLYLQMNSLRPEDTAVYYCTIGGSLSVS |
| | | SQGTLVTVSSsggpALFKSSFPpgscdlpqthnlrnkraltllvqmrrlsplsclkdrkdfgfpqekvdaqqi |
| | | kkaqaipvlseltqqilniftskdssaawnttlldsfcndlhqqlndlqgclmqqvgvqefpltqedallavrkyfhritvyl |
| | | rekkhspcawevvraevwralsssanvlgrlreeksggpALFKSSFPpgsEVQLVESGGGLVQPGNS |
| | | LRLSCAASGFTFSKFGMSWVRQAPGKGLEWVSSISGSGRDTLYAESVKGRFTI |
| | | SRDNAKTTLYLQMNSLRPEDTAVYYCTIGGSLSVSSQGTLVTVSS** |
| 426 | ACP205 | EVQLVESGGGLVQPGNSLRLSCAASGFTFSKFGMSWVRQAPGKGLEWVSSIS |
| | | GSGRDTLYAESVKGRFTISRDNAKTTLYLQMNSLRPEDTAVYYCTIGGSLSVS |
| | | SQGTLVTVSSsggpPLAQKLKSSpgscdlpqthnlrnkraltllvqmrrlsplsclkdrkdfgfpqekvdaq |
| | | qikkaqaipvlseltqqilniftskdssaawnttlldsfcndlhqqlndlqgclmqqvgvqefpltqedallavrkyfhritv |
| | | ylrekkhspcawewraevwralsssanvlgrlreeksggpPLAQKLKSSpgsEVQLVESGGGLVQP |
| | | GNSLRLSCAASGFTFSKFGMSWVRQAPGKGLEWVSSISGSGRDTLYAESVKG |
| | | RFTISRDNAKTTLYLQMNSLRPEDTAVYYCTIGGSLSVSSQGTLVTVSS** |
| 427 | ACP206 | EVQLVESGGGLVQPGNSLRLSCAASGFTFSKFGMSWVRQAPGKGLEWVSSIS |
| | | GSGRDTLYAESVKGRFTISRDNAKTTLYLQMNSLRPEDTAVYYCTIGGSLSVS |
| | | SQGTLVTVSSsggpGPAGLYAQpgscdlpqthslgsrrtlmllaqmrrislfsclkdrhdfgfpqeefgnqf |
| | | qkaetipvlhemiqqifnlfstkdssaawdetlldkfytelyqqlndleacviqgvgvtetplmkedsilavrkyfqritlyl |
| | | kekkyspcawevvraeimrsfslstnlqeslrskesggpGPAGLYAQpgsEVQLVESGGGLVQPGN |
| | | SLRLSCAASGFTFSKFGMSWVRQAPGKGLEWVSSISGSGRDTLYAESVKGRFT |
| | | ISRDNAKTTLYLQMNSLRPEDTAVYYCTIGGSLSVSSQGTLVTVSS** |
| 428 | ACP207 | EVQLVESGGGLVQPGNSLRLSCAASGFTFSKFGMSWVRQAPGKGLEWVSSIS |
| | | GSGRDTLYAESVKGRFTISRDNAKTTLYLQMNSLRPEDTAVYYCTIGGSLSVS |
| | | SQGTLVTVSSsggpALFKSSFPpgscdlpqthslgsrrtlmllaqmrrislfsclkdrhdfgfpqeefgnqfq |
| | | kaetipvlhemiqqifnlfstkdssaawdetlldkfytelyqqlndleacviqgvgvtetplmkedsilavrkyfqritlylk |
| | | ekkyspcawevvraeimrsfslstnlqeslrskesggpALFKSSFPpgsEVQLVESGGGLVQPGNSL |
| | | RLSCAASGFTFSKFGMSWVRQAPGKGLEWVSSISGSGRDTLYAESVKGRFTIS |
| | | RDNAKTTLYLQMNSLRPEDTAVYYCTIGGSLSVSSQGTLVTVSS** |
| 429 | ACP208 | EVQLVESGGGLVQPGNSLRLSCAASGFTFSKFGMSWVRQAPGKGLEWVSSIS |
| | | GSGRDTLYAESVKGRFTISRDNAKTTLYLQMNSLRPEDTAVYYCTIGGSLSVS |
| | | SQGTLVTVSSsggpPLAQKLKSSpgscdlpqthslgsrrtlmllaqmrrislfsclkdrhdfgfpqeefgnqf |
| | | qkaetipvlhemiqqifnlfstkdssaawdetlldkfytelyqqlndleacviqgvgvtetplmkedsilavrkyfqritlyl |
| | | kekkyspcawevvraeimrsfslstnlqeslrskesggpPLAQKLKSSpgsEVQLVESGGGLVQPG |
| | | NSLRLSCAASGFTFSKFGMSWVRQAPGKGLEWVSSISGSGRDTLYAESVKGRF |
| | | TISRDNAKTTLYLQMNSLRPEDTAVYYCTIGGSLSVSSQGTLVTVSS** |
| 430 | ACP211 | EVQLVESGGGLVQPGNSLRLSCAASGFTFSKFGMSWVRQAPGKGLEWVSSIS |
| | | GSGRDTLYAESVKGRFTISRDNAKTTLYLQMNSLRPEDTAVYYCTIGGSLSVS |
| | | SQGTLVTVSSSGGPGPAGMKGLPGShgtviesleslnnyfnssgidveekslfldiwrnwqkdgdm |
| | | kilqsqiisfylrlfevlkdnqaisnnisvieshlittffsnskakkdafmsiakfevnnpqvqrqafnelirvvhqllpesslr |
| | | krkrsrcSGGPGPAGMKGLPGScdlpqthnlrnkraltllvqmrrlsplsclkdrkdfgfpqekvdaqqikka |
| | | qaipvlseltqqilniftskdssaawnttlldsfcndlhqqlndlqgclmqqvgvqefpltqedallavrkyfhritvylrek |
| | | khspcawewraevwralsssanvlgrlreekSGGPGPAGMKGLPGShgtviesleslnnyfnssgidveek |
| | | slfldiwniwqkdgdmkilqsqiisfylrlfevlkdnqaisnnisvieshlittffsnskakkdafmsiakfevniipqvqr |
| | | qafnelirwhqllpesslrkrkrsrcSGGPGPAGMKGLPGSEVQLVESGGGLVQPGNSLRLS |
| | | CAASGFTFSKFGMSWVRQAPGKGLEWVSSISGSGRDTLYAESVKGRFTISRDN |
| | | AKTTLYLQMNSLRPEDTAVYYCTIGGSLSVSSQGTLVTVSSHHHHHH |
| 431 | ACP213 | lveepknlvktncdlyeklgeygfqnailviytqkapqvstptlveaarnlgrvgtkcctlpedqrlpcvedylsailnrvcl |
| | | lhektpvsehvtkccsgslverrpcfsaltvdetyvpkefkaetftfhsdictlpekekqikkqtalaelvkhkpkataeqlk |
| | | tvmddfaqfldtcckaadkdtcfstegpnlvtrckdalaSGGPGPAGMKGLPGShgtviesleslnnyfnssgi |
| | | dveekslfldiwrnwqkdgdmkilqsqiisfylrlfevlkdnqaisimisvieshlittffsnskakkdafmsiakfevnn |
| | | pqvqrqafnelirwhqllpesslrkrkrsrcSGGPGPAGMKGLPGSlveepknlvktncdlyeklgeygfqn |
| | | ailviytqkapqvstptlveaarnlgrvgtkcctlpedqrlpcvedylsailnrvcllhektpvsehvtkccsgslverrpcfs |
| | | altvdetyvpkefkaetftfhsdictlpekekqikkqtalaelvkhkpkataeqlktvmddfaqfldtcckaadkdtcfste |
| | | gpnlvtrckdalaSGGPGPAGMKGLPGShgtviesleslnnyfnssgidveekslfldiwrnwqkdgdmkil |
| | | qsqiisfylrlfevlkdnqaisnnisvieshlittffsnskakkdafmsiakfevnnpqvqrqafnelirwhqllpesslrkr |
| | | krsrcSGGPGPAGMKGLPGSlveepknlvktncdlyeklgeygfqnailviytqkapqvstptlveaarnlgr |
| | | vgtkcctlpedqrlpcvedylsailnrvcllhektpvsehvtkccsgslverrpcfsaltvdetyvpkefkaetftfhsdictl |
| | | pekekqikkqtalaelvkhkpkataeqlktvmddfaqfldtcckaadkdtcfstegpnlvtrckdalaHHHHHH** |
| 432 | ACP214 | eahkseiahiyndlgeqhfkglvliafsqylqkcsydehaklvqevtdfaktcvadesaancdkslhtlfgdklcaipnlr |
| | | enygeladcctkqepernecflqhkddnpslppferpeaeamctsfkenpttfmghylhevarrhpyfyapellyyaeq |
| | | yneiltqccaeadkescltpkldgvkekalvssvrqGGGGSGGGGSGGSlveepknlvktncdlyeklgeygf |
| | | qnailviytqkapqvstptlveaarnlgrvgtkcctlpedqrlpcvedylsailnrvcllhektpvsehvtkccsgslverrp |
| | | cfsaltvdetyvpkefkaetftfhsdictlpekekqikkqtalaelvkhkpkataeqlktvmddfaqfldtcckaadkdtcf |
| | | stegpnlvtrckdalaSGGPGPAGMKGLPGShgtviesleslnnyfnssgidveekslfldiwrnwqkdgdm |
| | | kilqsqiisfylrlfevlkdnqaisnnisvieshlittffsnskakkdafmsiakfevnnpqvqrqafnelirvvhqllpesslr |
| | | krkrsrcSGGPGPAGMKGLPGSeahkseiahryndlgeqhfkglvliafsqylqkcsydehaklvqevtdfa |
| | | ktcvadesaancdkslhtlfgdklcaipnlrenygeladcctkqepernecflqhkddnpslppferpeaeamctsfken |
| | | pttfmghylhevarrhpyfyapellyyaeqyneiltqccaeadkescltpkldgvkekalvssvrqGGGGSGGGG |
| | | SGGSlveepknlvktncdlyeklgeygfqnailviytqkapqvstptlveaarnlgrvgtkcctlpedqrlpcvedylsa |
| | | ilnrvcllhektpvsehvtkccsgslverrpcfsaltvdetyvpkefkaetftfhsdictlpekekqikkqtalaelvkhkpk |
| | | ataeqlktvmddfaqfldtcckaadkdtcfstegpnlvtrckdalaSGGPGPAGMKGLPGShgtviesleslnn |
| | | yfnssgidveekslfldiwrnwqkdgdmkilqsqiisfylrlfevlkdnqaisnnisvieshlittffsnskakkdafmsia |
| | | kfevnnpqvqrqafnelirvvhqllpesslrkrkrsrcSGGPGPAGMKGLPGSeahkseiahryndlgeqhfk |
| | | glvliafsqylqkcsydehaklvqevtdfaktcvadesaancdkslhtlfgdklcaipnlrenygeladcctkqepernec |
| | | flqhkddnpslppferpeaeamctsfkenpttfmghylhevarrhpyfyapellyyaeqyneiltqccaeadkescltpk |
| | | IdgvkekalvssvrqGGGGSGGGGSGGSlveepknlvktncdlyeklgeygfqnailviytqkapqvstptlv |
| | | eaarnlgrvgtkcctlpedqrlpcvedylsailnrvcllhektpvsehvtkccsgslverrpcfsaltvdetyvpkefkaetft |
| | | fhsdictlpekekqikkqtalaelvkhkpkataeqlktvmddfaqfldtcckaadkdtcfstegpnlvtrckdalaHHH |
| | | HHH** |
| 433 | ACP215 | EVQLVESGGGLVQPGNSLRLSCAASGFTFSKFGMSWVRQAPGKGLEWVSSIS |
| | | GSGRDTLYAESVKGRFTISRDNAKTTLYLQMNSLRPEDTAVYYCTIGGSLSVS |
| | | SQGTLVTVSSggggsgggSGGPGPAGMKGLPGSggggsgggshgtviesleslnnyfnssgidvee |
| | | kslfldiwniwqkdgdmkilqsqiisfylrlfevlkdnqaisnnisvieshlittffsnskakkdafmsiakfevnnpqvq |
| | | rqafnelirwhqllpesslrkrkrsrcggggsgggSGGPGPAGMKGLPGSggggsgggsEVQLVESG |
| | | GGLVQPGNSLRLSCAASGFTFSKFGMSWVRQAPGKGLEWVSSISGSGRDTLY |
| | | AESVKGRFTISRDNAKTTLYLQMNSLRPEDTAVYYCTIGGSLSVSSQGTLVTV |
| | | SSggggsgggSGGPGPAGMKGLPGSggggsgggshgtviesleslnnyfnssgidveekslfldiwrnwq |
| | | kdgdmkilqsqiisfylrlfevlkdnqaisnnisvieshlittffsnskakkdafmsiakfevnnpqvqrqafnelirvvhq |
| | | llpesslrkrkrsrcggggsgggSGGPGPAGMKGLPGSggggsgggsEVQLVESGGGLVQPGN |
| | | SLRLSCAASGFTFSKFGMSWVRQAPGKGLEWVSSISGSGRDTLYAESVKGRFT |
| | | ISRDNAKTTLYLQMNSLRPEDTAVYYCTIGGSLSVSSQGTLVTVSSHHHHHH* |
| | | * |
| 434 | ACP240 | EVQLVESGGGLVQPGNSLRLSCAASGFTFSKFGMSWVRQAPGKGLEWVSSIS |
| | | GSGRDTLYAESVKGRFTISRDNAKTTLYLQMNSLRPEDTAVYYCTIGGSLSVS |
| | | SQGTLVTVSSggggsggggsggggsiwelkkdvyweldwypdapgemwltcdtpeedgitwtldqssevl |
| | | gsgktltiqvkefgdagqytchkggevlshsllllhkkedgiwstdilkdqkepknktflrceaknysgrftcwwlttistd |
| | | ltfsvkssrgssdpqgvtcgaatlsaervrgdnkeyeysvecqedsacpaaeeslpievmvdavhklkyenytssffirdi |
| | | ikpdppknlqlkplknsrqvevsweypdtwstphsyfsltfcvqvqgkskrekkdrvftdktsatvicrknasisvraqd |
| | | ryyssswsewasvpcsggggsggggsggggsrvipvsgparcisqsrnllkttddmvktareklkhysctaedidhedi |
| | | trdqtstlktclplelhknesclatretssttrgsclppqktslmmtlclgsiyedlkmyqtefqainaalqnhnhqqiildkg |
| | | mlvaidelmqslnhngetlrqkppvgeadpyrvkmklcillhafstrvvtinrvmgylssaggggsggggsggggsg |
| | | gggsggggsggggsggggsggggsggggsQSVLTQPPSVSGAPGQRVTISCSGSRSNIGSNT |
| | | VKWYQQLPGTAPKLLIYYNDQRPSGVPDRFSGSKSGTSASLAITGLQAEDEAD |
| | | YYCQSYDRYTHPALLFGTGTKVTVLggggsggggsggggsQVQLVESGGGVVQPGR |
| | | SLRLSCAASGFTFSSYGMHWVRQAPGKGLEWVAFIRYDGSNKYYADSVKGR |
| | | FTISRDNSKNTLYLQMNSLRAEDTAVYYCKTHGSHDNWGQGTMVTVSSHHH |
| | | HHH |
| 435 | ACP241 | EAHKSEIAHRYNDLGEQHFKGLVLIAFSQYLQKCSYDEHAKLVQEVTDFAKT |
| | | CVADESAANCDKSLHTLFGDKLCAIPNLRENYGELADCCTKQEPERNECFLQH |
| | | KDDNPSLPPFERPEAEAMCTSFKENPTTFMGHYLHEVARRHPYFYAPELLYYA |
| | | EQYNEILTQCCAEADKESCLTPKLDGVKEKALVSSVRQRMKCSSMQKFGERA |
| | | FKAWAVARLSQTFPNADFAEITKLATDLTKVNKECCHGDLLECADDRAELAK |
| | | YMCENQATISSKLQTCCDKPLLKKAHCLSEVEHDTMPADLPAIAADFVEDQE |
| | | VCKNYAEAKDVFLGTFLYEYSRRHPDYSVSLLLRLAKKYEATLEKCCAEANP |
| | | PACYGTVLAEFQPLVEEPKNLVKTNCDLYEKLGEYGFQNAILVRYTQKAPQV |
| | | STPTLVEAARNLGRVGTKCCTLPEDQRLPCVEDYLSAILNRVCLLHEKTPVSE |
| | | HVTKCCSGSLVERRPCFSALTVDETYVPKEFKAETFTFHSDICTLPEKEKQIKK |
| | | QTALAELVKHKPKATAEQLKTVMDDFAQFLDTCCKAADKDTCFSTEGPNLVT |
| | | RCKDALASGGPGPAGMKGLPGSiwelkkdvyweldwypdapgemwltcdtpeedgitwtldqs |
| | | sevlgsgktltiqvkefgdagqytchkggevlshsllllhkkedgiwstdilkdqkepknktflrceaknysgrftcwwltt |
| | | istdltfsvkssrgssdpqgvtcgaatlsaervrgdnkeyeysvecqedsacpaaeeslpievmvdavhklkyenytssf |
| | | firdiikpdppknlqlkplknsrqvevsweypdtwstphsyfsltfcvqvqgkskrekkdrvftdktsatvicrknasisv |
| | | raqdryyssswsewasvpcsggggsggggsggggsrvipvsgparclsqsrnllkttddmvktareklkhysctaedi |
| | | dheditrdqtstlktclplelhknesclatretssttrgsclppqktslmmtlclgsiyedlkmyqtefqainaalqnhnhqqi |
| | | ildkgmlvaidelmqslnhngetlrqkppvgeadpyrvkmklcillhafstrvvtinrvmgylssaSGGPGPAG |
| | | MKGLPGSggggsggggsggggsggggsggggsggggsQSVLTQPPSVSGAPGQRVTISCSGS |
| | | RSNIGSNTVKWYQQLPGTAPKLLIYYNDQRPSGVPDRFSGSKSGTSASLAITGL |
| | | QAEDEADYYCQSYDRYTHPALLFGTGTKVTVLggggsggggsggggsQVQLVESGG |
| | | GVVQPGRSLRLSCAASGFTFSSYGMHWVRQAPGKGLEWVAFIRYDGSNKYY |
| | | ADSVKGRFTISRDNSKNTLYLQMNSLRAEDTAVYYCKTHGSHDNWGQGTMV |
| | | TVSSHHHHHH** |
| 436 | ACP242 | iwelkkdvyweldwypdapgemwltcdtpeedgitwtldqssevlgsgktltiqvkefgdagqytchkggevlshs |
| | | llllhkkedgiwstdilkdqkepknktflrceaknysgrftcwwlttistdltfsvkssrgssdpqgvtcgaatlsaervrgd |
| | | nkeyeysvecqedsacpaaeeslpievmvdavhklkyenytssffirdiikpdppknlqlkplknsrqvevsweypdt |
| | | wstphsyfsltfcvqvqgkskrekkdrvftdktsatvicrknasisvraqdryyssswsewasvpcsggggsggggsgg |
| | | ggsrvipvsgparclsqsrnllkttddmvktareklkhysctaedidheditrdqtstlktclplelhknesclatretssttr |
| | | gsclppqktslmmtlclgsiyedlkmyqtefqainaalqnhnhqqiildkgmlvaidelmqslnhngetlrqkppvgead |
| | | pyrvkmklcillhafstrvvtinrvmgylssaSGGPGPAGMKGLPGSggggsggggsggggsggggsggg |
| | | gsggggsQSVLTQPPSVSGAPGQRVTISCSGSRSNIGSNTVKWYQQLPGTAPKLLI |
| | | YYNDQRPSGVPDRFSGSKSGTSASLAITGLQAEDEADYYCQSYDRYTHPALLF |
| | | GTGTKVTVLggggsggggsggggsQVQLVESGGGVVQPGRSLRLSCAASGFTFSSYG |
| | | MHWVRQAPGKGLEWVAFIRYDGSNKYYADSVKGRFTISRDNSKNTLYLQMN |
| | | SLRAEDTAVYYCKTHGSHDNWGQGTMVTVSSSGGPGPAGMKGLPGSEAHKS |
| | | EIAHRYNDLGEQHFKGLVLIAFSQYLQKCSYDEHAKLVQEVTDFAKTCVADE |
| | | SAANCDKSLHTLFGDKLCAIPNLRENYGELADCCTKQEPERNECFLQHKDDNP |
| | | SLPPFERPEAEAMCTSFKENPTTFMGHYLHEVARRHPYFYAPELLYYAEQYNE |
| | | ILTQCCAEADKESCLTPKLDGVKEKALVSSVRQRMKCSSMQKFGERAFKAWA |
| | | VARLSQTFPNADFAEITKLATDLTKVNKECCHGDLLECADDRAELAKYMCEN |
| | | QATISSKLQTCCDKPLLKKAHCLSEVEHDTMPADLPAIAADFVEDQEVCKNY |
| | | AEAKDVFLGTFLYEYSRRHPDYSVSLLLRLAKKYEATLEKCCAEANPPACYG |
| | | TVLAEFQPLVEEPKNLVKTNCDLYEKLGEYGFQNAILVRYTQKAPQVSTPTLV |
| | | EAARNLGRVGTKCCTLPEDQRLPCVEDYLSAILNRVCLLHEKTPVSEHVTKCC |
| | | SGSLVERRPCFSALTVDETYVPKEFKAETFTFHSDICTLPEKEKQIKKQTALAEL |
| | | VKHKPKATAEQLKTVMDDFAQFLDTCCKAADKDTCFSTEGPNLVTRCKDAL |
| | | AHHHHHH** |
| 437 | ACP243 | vprdcgckpcictvpevssvfifppkpkdvltitltpkvtcvvvdiskddpevqfswfvddvevhtaqtqpreeqfnstf |
| | | rsvselpimhqdwlngkefkcrvnsaafpapiektisktkgrpkapqvytipppkeqmakdkvsltcmitdffpeditv |
| | | ewqwngqpaenykntqpimdtdgsyfvysklnvqksnweagntftcsvlheglhiihhtekslshspgkSGGPG |
| | | PAGMKGLPGSiwelkkdvyvveldwypdapgemvvltcdtpeedgitwtldqssevlgsgktltiqvkefgda |
| | | gqytchkggevlshsllllhkkedgiwstdilkdqkepknktflrceaknysgrftcwwlttistdltfsvkssrgssdpqg |
| | | vtcgaatlsaervrgdnkeyeysvecqedsacpaaeeslpievmvdavhklkyenytssffirdiikpdppknlqlkplk |
| | | nsrqvevsweypdtwstphsyfsltfcvqvqgkskrekkdrvftdktsatvicrknasisvraqdryyssswsewasvp |
| | | csggggsggggsggggsrvipvsgparclsqsrnllkttddmvktareklkhysctaedidheditrdqtstlktclplelh |
| | | knesclatretssttrgsclppqktslmmtlclgsiyedlkmyqtefqainaalqnhnhqqiildkgmlvaidelmqslnh |
| | | ngetlrqkppvgeadpyrvkmklcillhafstrvvtinrvmgylssaSGGPGPAGMKGLPGSggggsgggg |
| | | sggggsggggsggggsggggsQSVLTQPPSVSGAPGQRVTISCSGSRSNIGSNTVKWYQ |
| | | QLPGTAPKLLIYYNDQRPSGVPDRFSGSKSGTSASLAITGLQAEDEADYYCQS |
| | | YDRYTHPALLFGTGTKVTVLggggsggggsggggsQVQLVESGGGVVQPGRSLRLS |
| | | CAASGFTFSSYGMHWVRQAPGKGLEWVAFIRYDGSNKYYADSVKGRFTISRD |
| | | NSKNTLYLQMNSLRAEDTAVYYCKTHGSHDNWGQGTMVTVSSHHHHHH** |
| 438 | ACP244 | iwelkkdvyweldwypdapgemwltcdtpeedgitwtldqssevlgsgktltiqvkefgdagqytchkggevlshs |
| | | llllhkkedgiwstdilkdqkepknktflrceaknysgrftcwwlttistdltfsvkssrgssdpqgvtcgaatlsaervrgd |
| | | nkeyeysvecqedsacpaaeeslpievmvdavhklkyenytssffirdiikpdppknlqlkplknsrqvevsweypdt |
| | | wstphsyfsltfcvqvqgkskrekkdrvftdktsatvicrknasisvraqdryyssswsewasvpesggggsggggsgg |
| | | ggsrvipvsgparclsqsrnllkttddmvktareklkhysctaedidheditrdqtstlktclplelhknesclatretssttr |
| | | clppqktslmmtlclgsiyedlkmyqtefqainaalqnhnhqqiildkgmlvaidelmqslnhngetlrqkppvgead |
| | | gspyrvkmklcillhafstrvvtinrvmgylssaSGGPGPAGMKGLPGSggggsggggsggggsggggsggg |
| | | gsggggsQSVLTQPPSVSGAPGQRVTISCSGSRSNIGSNTVKWYQQLPGTAPKLLI |
| | | YYNDQRPSGVPDRFSGSKSGTSASLAITGLQAEDEADYYCQSYDRYTHPALLF |
| | | GTGTKVTVLggggsggggsggggsQVQLVESGGGVVQPGRSLRLSCAASGFTFSSYG |
| | | MHWVRQAPGKGLEWVAFIRYDGSNKYYADSVKGRFTISRDNSKNTLYLQMN |
| | | SLRAEDTAVYYCKTHGSHDNWGQGTMVTVSSSGGPGPAGMKGLPGSvprdcgc |
| | | kpcictvpevssvfifppkpkdvltitltpkvtcvvvdiskddpevqfswfvddvevhtaqtqpreeqfnstfrsvselpi |
| | | mhqdwlngkefkcrvnsaafpapiektisktkgrpkapqvytipppkeqmakdkvsltcmitdffpeditvewqwn |
| | | gqpaenykiitqpimdtdgsyfvysklnvqksnweagntftcsvlheglhnhhtekslshspgkHHHHHH** |
| 439 | ACP245 | EVQLVESGGGLVQPGNSLRLSCAASGFTFSKFGMSWVRQAPGKGLEWVSSIS |
| | | GSGRDTLYAESVKGRFTISRDNAKTTLYLQMNSLRPEDTAVYYCTIGGSLSVS |
| | | SQGTLVTVSSSGGPGPAGMKGLPGSiwelkkdvyvveldwypdapgemvvltcdtpeedgitwtl |
| | | dqssevlgsgktltiqvkefgdagqytchkggevlshsllllhkkedgiwstdilkdqkepknktflrceaknysgrftcw |
| | | wlttistdltfsvkssrgssdpqgvtcgaatlsaervrgdnkeyeysvecqedsacpaaeeslpievmvdavhklkyeny |
| | | tssffirdiikpdppknlqlkplknsrqvevsweypdtwstphsyfsltfcvqvqgkskrekkdrvftdktsatvicrkna |
| | | sisvraqdryyssswsewasvpcsggggsggggsggggsrvipvsgparclsqsrnllkttddmvktareklkhyscta |
| | | edidheditrdqtstlktclplelhknesclatretssttrgsclppqktslmmtlclgsiyedlkmyqtefqainaalqnhnh |
| | | qqiildkgmlvaidelmqslnhngetlrqkppvgeadpyrvkmklcillhafstrvvtinrvmgylssaSGGPGPA |
| | | GMKGLPGSggggsggggsggggsggggsggggsggggsQSVLTQPPSVSGAPGQRVTISCS |
| | | GSRSNIGSNTVKWYQQLPGTAPKLLIYYNDQRPSGVPDRFSGSKSGTSASLAIT |
| | | GLQAEDEADYYCQSYDRYTHPALLFGTGTKVTVLSGGPGPAGMKGLPGSQV |
| | | QLVESGGGVVQPGRSLRLSCAASGFTFSSYGMHWVRQAPGKGLEWVAFIRYD |
| | | GSNKYYADSVKGRFTISRDNSKNTLYLQMNSLRAEDTAVYYCKTHGSHDNW |
| | | GQGTMVTVSSHHHHHH |
| 440 | ACP247 | EVQLVESGGGLVQPGNSLRLSCAASGFTFSKFGMSWVRQAPGKGLEWVSSIS |
| | | GSGRDTLYAESVKGRFTISRDNAKTTLYLQMNSLRPEDTAVYYCTIGGSLSVS |
| | | SQGTLVTVSSSGGPGPAGMKGLPGSiwelkkdvyvveldwypdapgemvvltcdtpeedgitwtl |
| | | dqssevlgsgktltiqvkefgdagqytchkggevlshsllllhkkedgiwstdilkdqkepknktflrceaknysgrftcw |
| | | wlttistdltfsvkssrgssdpqgvtcgaatlsaervrgdnkeyeysvecqedsacpaaeeslpievmvdavhklkyeny |
| | | tssffirdiikpdppknlqlkplknsrqvevsweypdtwstphsyfsltfcvqvqgkskrekkdrvftdktsatvicrkna |
| | | sisvraqdryyssswsewasvpcsggggsggggsggggsrvipvsgparclsqsrnllkttddmvktareklkhyscta |
| | | edidheditrdqtstlktclplelhknesclatretssttrgsclppqktslmmtlclgsiyedlkmyqtefqainaalqnhnh |
| | | qqiildkgmlvaidelmqslnhngetlrqkppvgeadpyrvkmklcillhafstrvvtinrvmgylssaSGGPGPA |
| | | GMKGLPGSggggsggggsggggsggggsggggsggggsQVQLQESGGGLVQAGGSLRLSC |
| | | AASGRTFSSVYDMGWFRQAPGKDREFVARITESARNTRYADSVRGRFTISRDN |
| | | AKNTVYLQMNNLELEDAAVYYCAADPQTVVVGTPDYWGQGTQVTVSSHHH |
| | | HHH |
| 636 | WW0301 | APTSSSTKKTQLQLEHLLLDLQMILNGINNYKNPKLTRMLTFKFYMPKKATEL |
| | | KHLQCLEEELKPLEEVLNLAQSKNFHLRPRDLISNINVIVLELKGSETTFMCEY |
| | | ADETATIVEFLNRWITFCQSIISTLTSGGPGPAGMKGLPGSEVQLVESGGGLVQ |
| | | PGNSLRLSCAASGFTFSKFGMSWVRQAPGKGLEWVSSISGSGRDTLYAESVKG |
| | | RFTISRDNAKTTLYLQMNSLRPEDTAVYYCTIGGSLSVSSQGTLVTVSSGGGGS |
| | | GGGGSGGGGSGGGGSGGGGSGGGGSGGGGSGGGGSGGGGSEVQLVESGGGL |
| | | VQPGGSLRLSCAASGFTFSSYTLAWVRQAPGKGLEWVAAIDSSSYTYSPDTVR |
| | | GRFTISRDNAKNSLYLQMNSLRAEDTAVYYCARDSNWDALDYWGQGTTVTV |
| | | SSGGGGSGGGGSGGGGSDIQMTQSPSSLSASVGDRVTITCKASQNVGTNVGW |
| | | YQQKPGKAPKALIYSASFRYSGVPSRFSGSGSGTDFTLTISSLQPEDFATYYCQ |
| | | QYYTYPYTFGGGTKVEIKHHHHHH |
| 637 | WW0353 | APTSSSTKKTQLQLEHLLLDLQMILNGINNYKNPKLTRMLTFKFYMPKKATEL |
| | | KHLQCLEEELKPLEEVLNLAQSKNFHLRPRDLISNINVIVLELKGSETTFMCEY |
| | | ADETATIVEFLNRWITFCQSIISTLTSGGPGPAGMKGLPGSVPRDCGCKPCICTV |
| | | PEVSSVFIFPPKPKDVLTITLTPKVTCVVVDISKDDPEVQFSWFVDDVEVHTAQ |
| | | TQPREEQFNSTFRSVSELPIMHQDWLNGKEFKCRVNSAAFPAPIEKTISKTKGR |
| | | PKAPQVYTIPPPKEQMAKDKVSLTCMITDFFPEDITVEWQWNGQPAENYKNT |
| | | QPIMDTDGSYFVYSKLNVQKSNWEAGNTFTCSVLHEGLHNHHTEKSLSHSPG |
| | | KGGGGSGGGGSGGGGSGGGGSGGGGSGGGGSSGGPGPAGMKGLPGSEVQLV |
| | | ESGGGLVQPGGSLRLSCAASGFTFSSYTLAWVRQAPGKGLEWVAAIDSSSYTY |
| | | SPDTVRGRFTISRDNAKNSLYLQMNSLRAEDTAVYYCARDSNWDALDYWGQ |
| | | GTTVTVSSGGGGSGGGGSGGGGSDIQMTQSPSSLSASVGDRVTITCKASQNVG |
| | | TNVGWYQQKPGKAPKALIYSASFRYSGVPSRFSGSGSGTDFTLTISSLQPEDFA |
| | | TYYCQQYYTYPYTFGGGTKVEIKHHHHHH |
| 638 | WW0355 | APTSSSTKKTQLQLEHLLLDLQMILNGINNYKNPKLTRMLTFKFYMPKKATEL |
| | | KHLQCLEEELKPLEEVLNLAQSKNFHLRPRDLISNINVIVLELKGSETTFMCEY |
| | | ADETATIVEFLNRWITFCQSIISTLTSGGPGPAGMKGLPGSGGGGSGGGGSGGG |
| | | GSGGGGSGGGGSGGGGSEVQLVESGGGLVQPGGSLRLSCAASGFTFSSYTLA |
| | | WVRQAPGKGLEWVAAIDSSSYTYSPDTVRGRFTISRDNAKNSLYLQMNSLRA |
| | | EDTAVYYCARDSNWDALDYWGQGTTVTVSSGGGGSGGGGSGGGGSDIQMT |
| | | QSPSSLSASVGDRVTITCKASQNVGTNVGWYQQKPGKAPKALIYSASFRYSGV |
| | | PSRFSGSGSGTDFTLTISSLQPEDFATYYCQQYYTYPYTFGGGTKVEIKSGGPG |
| | | PAGMKGLPGSVPRDCGCKPCICTVPEVSSVFIFPPKPKDVLTITLTPKVTCVVV |
| | | DISKDDPEVQFSWFVDDVEVHTAQTQPREEQFNSTFRSVSELPIMHQDWLNGK |
| | | EFKCRVNSAAFPAPIEKTISKTKGRPKAPQVYTIPPPKEQMAKDKVSLTCMITD |
| | | FFPEDITVEWQWNGQPAENYKNTQPIMDTDGSYFVYSKLNVQKSNWEAGNT |
| | | FTCSVLHEGLHNHHTEKSLSHSPGKHHHHHH |
| 639 | WW0365 | APTSSSTKKTQLQLEHLLLDLQMILNGINNYKNPKLTRMLTFKFYMPKKATEL |
| | | KHLQCLEEELKPLEEVLNLAQSKNFHLRPRDLISNINVIVLELKGSETTFMCEY |
| | | ADETATIVEFLNRWITFCQSIISTLTGGGSGGGSGGGSGGGSEVQLVESGGGLV |
| | | QPGNSLRLSCAASGFTFSKFGMSWVRQAPGKGLEWVSSISGSGRDTLYAESVK |
| | | GRFTISRDNAKTTLYLQMNSLRPEDTAVYYCTIGGSLSVSSQGTLVTVSSGGG |
| | | GSGGGGSGGGGSGGGGSGGGGSGGGGSSGGPGPAGMKGLPGSEVQLVESGG |
| | | GLVQPGGSLRLSCAASGFTFSSYTLAWVRQAPGKGLEWVAAIDSSSYTYSPDT |
| | | VRGRFTISRDNAKNSLYLQMNSLRAEDTAVYYCARDSNWDALDYWGQGTTV |
| | | TVSSGGGGSGGGGSGGGGSDIQMTQSPSSLSASVGDRVTITCKASQNVGTNVG |
| | | WYQQKPGKAPKALIYSASFRYSGVPSRFSGSGSGTDFTLTISSLQPEDFATYYC |
| | | QQYYTYPYTFGGGTKVEIKHHHHHHEPEA |
| 640 | WW0366 | APTSSSTKKTQLQLEHLLLDLQMILNGINNYKNPKLTRMLTFKFYMPKKATEL |
| | | KHLQCLEEELKPLEEVLNLAQSKNFHLRPRDLISNINVIVLELKGSETTFMCEY |
| | | ADETATIVEFLNRWITFCQSIISTLTSGGPGPAGMKGLPGSEVQLVESGGGLVQ |
| | | PGNSLRLSCAASGFTFSKFGMSWVRQAPGKGLEWVSSISGSGRDTLYAESVKG |
| | | RFTISRDNAKTTLYLQMNSLRPEDTAVYYCTIGGSLSVSSQGTLVTVSSHHHH |
| | | HHEPEA |
| 641 | WW0472 | VPRDCGCKPCICTVPEVSSVFIFPPKPKDVLTITLTPKVTCVVVDISKDDPEVQF |
| | | SWFVDDVEVHTAQTQPREEQFNSTFRSVSELPIMHQDWLNGKEFKCRVNSAA |
| | | FPAPIEKTISKTKGRPKAPQVYTIPPPKEQMAKDKVSLTCMITDFFPEDITVEWQ |
| | | WNGQPAENYKNTQPIMDTDGSYFVYSKLNVQKSNWEAGNTFTCSVLHEGLH |
| | | NHHTEKSLSHSPGKSGGPGPAGLYAQPGSAPTSSSTKKTQLQLEHLLLDLQMI |
| | | LNGINNYKNPKLTRMLTFKFYMPKKATELKHLQCLEEELKPLEEVLNLAQSK |
| | | NFHLRPRDLISNINVIVLELKGSETTFMCEYADETATIVEFLNRWITFCQSIISTL |
| | | TGGGGSGGGGSGGGGSGGGGSGGGGSGGGGSSGGPGPAGLYAQPGSEVQLV |
| | | ESGGGLVQPGGSLRLSCAASGFTFSSYTLAWVRQAPGKGLEWVAAIDSSSYTY |
| | | SPDTVRGRFTISRDNAKNSLYLQMNSLRAEDTAVYYCARDSNWDALDYWGQ |
| | | GTTVTVSSSGGPGPAGLYAQPGSDIQMTQSPSSLSASVGDRVTITCKAREKLW |
| | | SAVAWYQQKPGKAPKSLIYSASFRYSGVPSRFSGSGSGTDFTLTISSLQPEDFA |
| | | TYYCQQYYTYPYTFGGGTKVEIK |
| 642 | WW0473 | VPRDCGCKPCICTVPEVSSVFIFPPKPKDVLTITLTPKVTCVVVDISKDDPEVQF |
| | | SWFVDDVEVHTAQTQPREEQFNSTFRSVSELPIMHQDWLNGKEFKCRVNSAA |
| | | FPAPIEKTISKTKGRPKAPQVYTIPPPKEQMAKDKVSLTCMITDFFPEDITVEWQ |
| | | WNGQPAENYKNTQPIMDTDGSYFVYSKLNVQKSNWEAGNTFTCSVLHEGLH |
| | | NHHTEKSLSHSPGKSGGPGPAGLYAQPGSAPTSSSTKKTQLQLEHLLLDLQMI |
| | | LNGINNYKNPKLTRMLTFKFYMPKKATELKHLQCLEEELKPLEEVLNLAQSK |
| | | NFHLRPRDLISNINVIVLELKGSETTFMCEYADETATIVEFLNRWITFCQSIISTL |
| | | TGGGGSGGGGSGGGGSGGGGSGGGGSGGGGSSGGPGPAGLYAQPGSEVQLV |
| | | ESGGGLVQPGGSLRLSCAASGFTFSSYTLAWVRQAPGKGLEWVAAIDSSSYTY |
| | | SPDTVRGRFTISRDNAKNSLYLQMNSLRAEDTAVYYCARDSNWDALDYWGQ |
| | | GTTVTVSSGGGGSGGGGSGGGGSDIQMTQSPSSLSASVGDRVTITCKAREKLW |
| | | SAVAWYQQKPGKAPKSLIYSASFRYSGVPSRFSGSGSGTDFTLTISSLQPEDFA |
| | | TYYCQQYYTYPYTFGGGTKVEIK |
| 643 | WW0474 | VPRDCGCKPCICTVPEVSSVFIFPPKPKDVLTITLTPKVTCVVVDISKDDPEVQF |
| | | SWFVDDVEVHTAQTQPREEQFNSTFRSVSELPIMHQDWLNGKEFKCRVNSAA |
| | | FPAPIEKTISKTKGRPKAPQVYTIPPPKEQMAKDKVSLTCMITDFFPEDITVEWQ |
| | | WNGQPAENYKNTQPIMDTDGSYFVYSKLNVQKSNWEAGNTFTCSVLHEGLH |
| | | NHHTEKSLSHSPGKSGGPGPAGLYAQPGSAPTSSSTKKTQLQLEHLLLDLQMI |
| | | LNGINNYKNPKLTRMLTFKFYMPKKATELKHLQCLEEELKPLEEVLNLAQSK |
| | | NFHLRPRDLISNINVIVLELKGSETTFMCEYADETATIVEFLNRWITFCQSIISTL |
| | | TGGGGSGGGGSGGGGSGGGGSGGGGSGGGGSSGGPGPAGLYAQPGSEVQLV |
| | | ESGGGLVQPGGSLRLSCAASGFTFSSYTLAWVRQAPGKGLEWVAAIDSSSYTY |
| | | SPDTVRGRFTISRDNAKNSLYLQMNSLRAEDTAVYYCARDSNWDALDYWGQ |
| | | GTTVTVSSSGGPGPAGLYAQPGSDIQMTQSPSSLSASVGDRVTITCKVTEKVW |
| | | GNVAWYQQKPGKAPISLIYSPSLRKSGVPSRFSGSGSGTDFTLTISSLQPEDFAT |
| | | YYCQQYYTYPYTFGGGTKVEIK |
| 644 | WW0475 | VPRDCGCKPCICTVPEVSSVFIFPPKPKDVLTITLTPKVTCVVVDISKDDPEVQF |
| | | SWFVDDVEVHTAQTQPREEQFNSTFRSVSELPIMHQDWLNGKEFKCRVNSAA |
| | | FPAPIEKTISKTKGRPKAPQVYTIPPPKEQMAKDKVSLTCMITDFFPEDITVEWQ |
| | | WNGQPAENYKNTQPIMDTDGSYFVYSKLNVQKSNWEAGNTFTCSVLHEGLH |
| | | NHHTEKSLSHSPGKSGGPGPAGLYAQPGSAPTSSSTKKTQLQLEHLLLDLQMI |
| | | LNGINNYKNPKLTRMLTFKFYMPKKATELKHLQCLEEELKPLEEVLNLAQSK |
| | | NFHLRPRDLISNINVIVLELKGSETTFMCEYADETATIVEFLNRWITFCQSIISTL |
| | | TGGGGSGGGGSGGGGSGGGGSGGGGSGGGGSSGGPGPAGLYAQPGSEVQLV |
| | | ESGGGLVQPGGSLRLSCAASGFTFSSYTLAWVRQAPGKGLEWVAAIDSSSYTY |
| | | SPDTVRGRFTISRDNAKNSLYLQMNSLRAEDTAVYYCARDSNWDALDYWGQ |
| | | GTTVTVSSGGGGSGGGGSGGGGSDIQMTQSPSSLSASVGDRVTITCKVTEKV |
| | | WGNVAWYQQKPGKAPISLIYSPSLRKSGVPSRFSGSGSGTDFTLTISSLQPEDF |
| | | ATYYCQQYYTYPYTFGGGTKVEIK |
| 645 | WW0476 | VPRDCGCKPCICTVPEVSSVFIFPPKPKDVLTITLTPKVTCVVVDISKDDPEVQF |
| | | SWFVDDVEVHTAQTQPREEQFNSTFRSVSELPIMHQDWLNGKEFKCRVNSAA |
| | | FPAPIEKTISKTKGRPKAPQVYTIPPPKEQMAKDKVSLTCMITDFFPEDITVEWQ |
| | | WNGQPAENYKNTQPIMDTDGSYFVYSKLNVQKSNWEAGNTFTCSVLHEGLH |
| | | NHHTEKSLSHSPGKSGGPGPAGLYAQPGSAPTSSSTKKTQLQLEHLLLDLQMI |
| | | LNGINNYKNPKLTRMLTFKFYMPKKATELKHLQCLEEELKPLEEVLNLAQSK |
| | | NFHLRPRDLISNINVIVLELKGSETTFMCEYADETATIVEFLNRWITFCQSIISTL |
| | | TGGGGSGGGGSGGGGSGGGGSGGGGSGGGGSSGGPGPAGLYAQPGSEVQLL |
| | | ESGGGLVQPGGSLRLSCAASGSIFSANAMGWYRQAPGKGLELVAVISSGGSTN |
| | | YADSVKGRFTISRDNSKNTVYLQMNSLRAEDTAVYYCMYSGSYYYTPNDYW |
| | | GQGTLVTVSS |
| 646 | WW0477 | VPRDCGCKPCICTVPEVSSVFIFPPKPKDVLTITLTPKVTCVVVDISKDDPEVQF |
| | | SWFVDDVEVHTAQTQPREEQFNSTFRSVSELPIMHQDWLNGKEFKCRVNSAA |
| | | FPAPIEKTISKTKGRPKAPQVYTIPPPKEQMAKDKVSLTCMITDFFPEDITVEWQ |
| | | WNGQPAENYKNTQPIMDTDGSYFVYSKLNVQKSNWEAGNTFTCSVLHEGLH |
| | | NHHTEKSLSHSPGKSGGPGPAGLYAQPGSAPTSSSTKKTQLQLEHLLLDLQMI |
| | | LNGINNYKNPKLTRMLTFKFYMPKKATELKHLQCLEEELKPLEEVLNLAQSK |
| | | NFHLRPRDLISNINVIVLELKGSETTFMCEYADETATIVEFLNRWITFCQSIISTL |
| | | TGGGGSGGGGSGGGGSGGGGSGGGGSGGGGSSGGPGPAGLYAQPGSEVQLL |
| | | ESGGGLVQPGGSLRLSCAASERIFSTDVMGWYRQAPGKQRELVAVVSARGTT |
| | | NYLDAVKGRFTISRDNSKNTLYLQMNSLRAEDTAVYYCYVRETTSPWRIYWG |
| | | QGTLVTVSS |
| 647 | WW0649 | EVQLVESGGGLVQPGNSLRLSCAASGFTFSKFGMSWVRQAPGKGLEWVSSIS |
| | Monomeric | GSGRDTLYAESVKGRFTISRDNAKTTLYLQMNSLRPEDTAVYYCTIGGSLSVS |
| | IL-12 | SQGTLVTVSSsggpGPAGLYAQpgsiwelkkdvyvveldwypdapgemvvltcdtpeedgitwtldqs |
| | (chimeric) | sevlgsgktltiqvkefgdagqytchkggevlshsllllhkkedgiwstdilkdqkepknktflrceaknysgrftcwwltt |
| | polypep- | istdltfsvkssrgssdpqgvtcgaatlsaervrgdnkeyeysvecqedsacpaaeeslpievmvdavhklkyenytssf |
| | tide, | firdiikpdppknlqlkplknsrqvevsweypdtwstphsyfsltfcvqvqgkskrekkdrvftdktsatvicrknasisv |
| | anti-HSA | raqdryyssswsewasvpcsggggsggggsggggsrvipvsgparclsqsrnllkttddmvktareklkhysctaedi |
| | sdAb, | dheditrdqtstlktclplelhknesclatretssttrgsclppqktslmmtlclgsiyedlkmyqtefqainaalqnhnhqqi |
| | scFv | ildkgmlvaidelmqslnhngetlrqkppvgeadpyrvkmklcillhafstrvvtinrvmgylssasggpGPAGLY |
| | Blocker, | AQpgsggggsggggsggggsggggsggggsggggsQSVLTQPPSVSGAPGQRVTISCSGSRSN |
| | 2 | IGSNTVKWYQQLPGTAPKLLIYYNDQRPSGVPDRFSGSKSGTSASLAITGLQAE |
| | cleavage | DEADYYCQSYDRYTHPALLFGTGTKVTVLggggsggggsggggsQVQLVESGGGVV |
| | sites | QPGRSLRLSCAASGFTFSSYGMHWVRQAPGKGLEWVAFIRYDGSNKYYADS |
| | | VKGRFTISRDNSKNTLYLQMNSLRAEDTAVYYCKTHGSHDNWGQGTMVTVS |
| | | S** |
| 454 | WW0650 | EVQLVESGGGLVQPGNSLRLSCAASGFTFSKFGMSWVRQAPGKGLEWVSSIS |
| | | GSGRDTLYAESVKGRFTISRDNAKTTLYLQMNSLRPEDTAVYYCTIGGSLSVS |
| | | SQGTLVTVSSsggpGPAGLYAQpgsiwelkkdvyvveldwypdapgemvvltcdtpeedgitwtldqs |
| | | sevlgsgktltiqvkefgdagqytchkggevlshsllllhkkedgiwstdilkdqkepknktflrceaknysgrftcwwltt |
| | | istdltfsvkssrgssdpqgvtcgaatlsaervrgdnkeyeysvecqedsacpaaeeslpievmvdavhklkyenytssf |
| | | firdiikpdppknlqlkplknsrqvevsweypdtwstphsyfsltfcvqvqgkskrekkdrvftdktsatvicrknasisv |
| | | raqdryyssswsewasvpcsggggsggggsggggsrnlpvatpdpgmfpclhhsqnllravsnmlqkarqtlelypc |
| | | tseeidheditkdktstveaclpleltknesclnsretsfitngsclasrktsfmmalclssiyedlkmyqvefktmnakllm |
| | | dpkrqifldqnmlavidelmqalnfnsetvpqkssleepdfyktkiklcillhafriravtidrvmsylnassggpGPA |
| | | GLYAQpgsggggsggggsggggsggggsggggsggggsQSVLTQPPSVSGAPGQRVTISCSG |
| | | SRSNIGSNTVKWYQQLPGTAPKLLIYYNDQRPSGVPDRFSGSKSGTSASLAITG |
| | | LQAEDEADYYCQSYDRYTHPALLFGTGTKVTVLggggsggggsggggsQVQLVESG |
| | | GGVVQPGRSLRLSCAASGFTFSSYGMHWVRQAPGKGLEWVAFIRYDGSNKY |
| | | YADSVKGRFTISRDNSKNTLYLQMNSLRAEDTAVYYCKTHGSHDNWGQGTM |
| | | VTVSS** |
| 455 | WW0651 | EVQLVESGGGLVQPGNSLRLSCAASGFTFSKFGMSWVRQAPGKGLEWVSSIS |
| | | GSGRDTLYAESVKGRFTISRDNAKTTLYLQMNSLRPEDTAVYYCTIGGSLSVS |
| | | SQGTLVTVSSsggpALFKSSFPpgsiwelkkdvyvveldwypdapgemvvltcdtpeedgitwtldqss |
| | | evlgsgktltiqvkefgdagqytchkggevlshsllllhkkedgiwstdilkdqkepknktflrceaknysgrftcwwltti |
| | | stdltfsvkssrgssdpqgvtcgaatlsaervrgdnkeyeysvecqedsacpaaeeslpievmvdavhklkyenytssff |
| | | irdiikpdppknlqlkplknsrqvevsweypdtwstphsyfsltfcvqvqgkskrekkdrvftdktsatvicrknasisvr |
| | | aqdryyssswsewasvpcsggggsggggsggggsrvipvsgparclsqsrnllkttddmvktareklkhysctaedid |
| | | heditrdqtstlktclplelhknesclatretssttrgsclppqktslmmtlclgsiyedlkmyqtefqainaalqnhnhqqiil |
| | | dkgmlvaidelmqslnhngetlrqkppvgeadpyrvkmklcillhafstrvvtinrvmgylssasggpALFKSSF |
| | | PpgsggggsggggsggggsggggsggggsggggsQSVLTQPPSVSGAPGQRVTISCSGSRSNI |
| | | GSNTVKWYQQLPGTAPKLLIYYNDQRPSGVPDRFSGSKSGTSASLAITGLQAE |
| | | DEADYYCQSYDRYTHPALLFGTGTKVTVLggggsggggsggggsQVQLVESGGGVV |
| | | QPGRSLRLSCAASGFTFSSYGMHWVRQAPGKGLEWVAFIRYDGSNKYYADS |
| | | VKGRFTISRDNSKNTLYLQMNSLRAEDTAVYYCKTHGSHDNWGQGTMVTVS |
| | | S** |
| 456 | WW0652 | EVQLVESGGGLVQPGNSLRLSCAASGFTFSKFGMSWVRQAPGKGLEWVSSIS |
| | | GSGRDTLYAESVKGRFTISRDNAKTTLYLQMNSLRPEDTAVYYCTIGGSLSVS |
| | | SQGTLVTVSSsggpALFKSSFPpgsiwelkkdvyvveldwypdapgemvvltcdtpeedgitwtldqss |
| | | evlgsgktltiqvkefgdagqytchkggevlshsllllhkkedgiwstdilkdqkepknktflrceaknysgrftcwwltti |
| | | stdltfsvkssrgssdpqgvtcgaatlsaervrgdnkeyeysvecqedsacpaaeeslpievmvdavhklkyenytssff |
| | | irdiikpdppknlqlkplknsrqvevsweypdtwstphsyfsltfcvqvqgkskrekkdrvftdktsatvicrknasisvr |
| | | aqdryyssswsewasvpcsggggsggggsggggsrnlpvatpdpgmfpclhhsqnllravsnmlqkarqtlefypct |
| | | seeidheditkdktstveaclpleltknesclnsretsfitngsclasrktsfmmalclssiyedlkmyqvefktmnakllm |
| | | dpkrqifldqnmlavidelmqalnfnsetvpqkssleepdfyktkiklcillhafriravtidrvmsylnassggpALFK |
| | | SSFPpgsggggsggggsggggsggggsggggsggggsQSVLTQPPSVSGAPGQRVTISCSGSRS |
| | | NIGSNTVKWYQQLPGTAPKLLIYYNDQRPSGVPDRFSGSKSGTSASLAITGLQ |
| | | AEDEADYYCQSYDRYTHPALLFGTGTKVTVLggggsggggsggggsQVQLVESGGG |
| | | VVQPGRSLRLSCAASGFTFSSYGMHWVRQAPGKGLEWVAFIRYDGSNKYYA |
| | | DSVKGRFTISRDNSKNTLYLQMNSLRAEDTAVYYCKTHGSHDNWGQGTMVT |
| | | VSS** |
| 457 | WW0662 | EVQLVESGGGLVQPGNSLRLSCAASGFTFSKFGMSWVRQAPGKGLEWVSSIS |
| | | GSGRDTLYAESVKGRFTISRDNAKTTLYLQMNSLRPEDTAVYYCTIGGSLSVS |
| | | SQGTLVTVSSsggpGPAGLYAQpgsiwelkkdvyvveldwypdapgemvvltcdtpeedgitwtldqs |
| | | sevlgsgktltiqvkefgdagqytchkggevlshsllllhkkedgiwstdilkdqkepknktflrceaknysgrftcwwltt |
| | | istdltfsvkssrgssdpqgvtcgaatlsaervrgdnkeyeysvecqedsacpaaeeslpievmvdavhklkyenytssf |
| | | firdiikpdppknlqlkplknsrqvevsweypdtwstphsyfsltfcvqvqgkskrekkdrvftdktsatvicrknasisv |
| | | raqdryyssswsewasvpcsggggsggggsggggsrvipvsgparclsqsrnllkttddmvktareklkhysctaedi |
| | | dheditrdqtstlktclplelhknesclatretssttrgsclppqktslmmtlclgsiyedlkmyqtefqainaalqnlmhqqi |
| | | ildkgmlvaidelmqslnhngetlrqkppvgeadpyrvkmklcillhafstrvvtinrvmgylssasggpGPAGLY |
| | | AQpgsggggsggggsggggsggggsggggsggggsQSVLTQPPSVSGAPGQRVTISCSGSRSN |
| | | IGSNTVKWYQQLPGTAPKLLIYYNDQRPSGVPDRFSGSKSGTSASLAITGLQAE |
| | | DEADYYCQSYDRYTHPALLFGTGTKVTVLggggsggggsggggsQVQLVESGGGVV |
| | | QPGRSLRLSCAASGFTFSSYGMHWVRQAPGKGLEWVAFIRYeGSNKYYAeSV |
| | | KGRFTISRDNSKNTLYLQMNSLRAEDTAVYYCKTHGSHDNWGQGTMVTVSS |
| | | ** |
| 458 | WW0663 | EVQLVESGGGLVQPGNSLRLSCAASGFTFSKFGMSWVRQAPGKGLEWVSSIS |
| | | GSGRDTLYAESVKGRFTISRDNAKTTLYLQMNSLRPEDTAVYYCTIGGSLSVS |
| | | SQGTLVTVSSsggpGPAGLYAQpgsiwelkkdvyvveldwypdapgemvvltcdtpeedgitwtldqs |
| | | sevlgsgktltiqvkefgdagqytchkggevlshsllllhkkedgiwstdilkdqkepknktflrceaknysgrftcwwltt |
| | | istdltfsvkssrgssdpqgvtcgaatlsaervrgdnkeyeysvecqedsacpaaeeslpievmvdavhklkyenytssf |
| | | firdiikpdppknlqlkplknsrqvevsweypdtwstphsyfsltfcvqvqgkskrekkdrvftdktsatvicrknasisv |
| | | raqdryyssswsewasvpcsggggsggggsggggsrnlpvatpdpgmfpclhhsqnllravsnmlqkarqtlefypc |
| | | tseeidheditkdktstveaclpleltknesclnsretsfitngsclasrktsfmmalclssiyedlkmyqvefktmnakllm |
| | | dpkrqifldqnmlavidelmqalnfnsetvpqkssleepdfyktkiklcillhafriravtidrvmsylnassggpGPA |
| | | GLYAQpgsggggsggggsggggsggggsggggsggggsQSVLTQPPSVSGAPGQRVTISCSG |
| | | SRSNIGSNTVKWYQQLPGTAPKLLIYYNDQRPSGVPDRFSGSKSGTSASLAITG |
| | | LQAEDEADYYCQSYDRYTHPALLFGTGTKVTVLggggsggggsggggsQVQLVESG |
| | | GGVVQPGRSLRLSCAASGFTFSSYGMHWVRQAPGKGLEWVAFIRYeGSNKYY |
| | | AeSVKGRFTISRDNSKNTLYLQMNSLRAEDTAVYYCKTHGSHDNWGQGTMV |
| | | TVSS** |
| 459 | WW0664 | EVQLVESGGGLVQPGNSLRLSCAASGFTFSKFGMSWVRQAPGKGLEWVSSIS |
| | | GSGRDTLYAESVKGRFTISRDNAKTTLYLQMNSLRPEDTAVYYCTIGGSLSVS |
| | | SQGTLVTVSSsggpGPAGLYAQpgsiwelkkdvyvveldwypdapgemvvltcdtpeedgitwtldqs |
| | | sevlgsgktltiqvkefgdagqytchkggevlshsllllhkkedgiwstdilkdqkepknktflrceaknysgrftcwwltt |
| | | istdltfsvkssrgssdpqgvtcgaatlsaervrgdnkeyeysvecqedsacpaaeeslpievmvdavhklkyenytssf |
| | | firdiikpdppknlqlkplknsrqvevsweypdtwstphsyfsltfcvqvqgkskrekkdrvftdktsatvicrknasisv |
| | | raqdryyssswsewasvpcsggggsggggsggggsrvipvsgparclsqsrnllkttddmvktareklkhysctaedi |
| | | dheditrdqtstlktclplelhknesclatretssttrgsclppqktslmmtlclgsiyedlkmyqtefqainaalqnlmhqqi |
| | | ildkgmlvaidelmqslnhngetlrqkppvgeadpyrvkmklcillhafstrvvtinrvmgylssasggpGPAGLY |
| | | AQpgsggggsggggsggggsggggsggggsggggsQSVLTQPPSVSGAPGQRVTISCSGSRSN |
| | | IGSeTVKWYQQLPGTAPKLLIYYNDQRPSGVPDRFSGSKSGTSASLAITGLQAE |
| | | DEADYYCQSYDRYTHPALLFGTGTKVTVLggggsggggsggggsQVQLVESGGGVV |
| | | QPGRSLRLSCAASGFTFSSYGMHWVRQAPGKGLEWVAFIRYeGSNKYYAeSV |
| | | KGRFTISRDNSKNTLYLQMNSLRAEDTAVYYCKTHGSHDNWGQGTMVTVSS |
| | | ** |
| 460 | WW0665 | EVQLVESGGGLVQPGNSLRLSCAASGFTFSKFGMSWVRQAPGKGLEWVSSIS |
| | | GSGRDTLYAESVKGRFTISRDNAKTTLYLQMNSLRPEDTAVYYCTIGGSLSVS |
| | | SQGTLVTVSSsggpGPAGLYAQpgsiwelkkdvyvveldwypdapgemvvltcdtpeedgitwtldqs |
| | | sevlgsgktltiqvkefgdagqytchkggevlshsllllhkkedgiwstdilkdqkepknktflrceaknysgrftcwwltt |
| | | istdltfsvkssrgssdpqgvtcgaatlsaervrgdnkeyeysvecqedsacpaaeeslpievmvdavhklkyenytssf |
| | | firdiikpdppknlqlkplknsrqvevsweypdtwstphsyfsltfcvqvqgkskrekkdrvftdktsatvicrknasisv |
| | | raqdryyssswsewasvpcsggggsggggsggggsrnlpvatpdpgmfpclhhsqnllravsnmlqkarqtlefypc |
| | | tseeidheditkdktstveaclpleltknesclnsretsfitngsclasrktsfmmalclssiyedlkmyqvefktmnakllm |
| | | dpkrqifldqnmlavidelmqalnfnsetvpqkssleepdfyktkiklcillhafriravtidrvmsylnassggpGPA |
| | | GLYAQpgsggggsggggsggggsggggsggggsggggsQSVLTQPPSVSGAPGQRVTISCSG |
| | | SRSNIGSeTVKWYQQLPGTAPKLLIYYNDQRPSGVPDRFSGSKSGTSASLAITG |
| | | LQAEDEADYYCQSYDRYTHPALLFGTGTKVTVLggggsggggsggggsQVQLVESG |
| | | GGVVQPGRSLRLSCAASGFTFSSYGMHWVRQAPGKGLEWVAFIRYeGSNKYY |
| | | AeSVKGRFTISRDNSKNTLYLQMNSLRAEDTAVYYCKTHGSHDNWGQGTMV |
| | | TVSS** |
| 461 | WW0666 | EVQLVESGGGLVQPGNSLRLSCAASGFTFSKFGMSWVRQAPGKGLEWVSSIS |
| | | GSGRDTLYAESVKGRFTISRDNAKTTLYLQMNSLRPEDTAVYYCTIGGSLSVS |
| | | SQGTLVTVSSsggpGPAGLYAQpgsiwelkkdvyvveldwypdapgemvvltcdtpeedgitwtldqs |
| | | sevlgsgktltiqvkefgdagqytehkggevlshsllllhkkedgiwstdilkdqkepknktflrceaknysgrftcwwltt |
| | | istdltfsvkssrgssdpqgvtcgaatlsaervrgdnkeyeysvecqedsacpaaeeslpievmvdavhklkyenytssf |
| | | firdiikpdppknlqlkplknsrqvevsweypdtwstphsyfsltfcvqvqgkskrekkdrvftdktsatvicrknasisv |
| | | raqdryyssswsewasvpcsggggsggggsggggsrvipvsgparclsqsrnllkttddmvktareklkhysctaedi |
| | | dheditrdqtstlktclplelhknesclatretssttrgsclppqktslmmtlclgsiyedlkmyqtefqainaalqnlmhqqi |
| | | ildkgmlvaidelmqslnhngetlrqkppvgeadpyrvkmklcillhafstrvvtinrvmgylssasggpGPAGLY |
| | | AQpgsggggsggggsggggsggggsggggsggggsQSVLTQPPSVSGAPGQRVTISCSGSRSN |
| | | IGdNTVKWYQQLPGTAPKLLIYYNDQRPSGVPDRFSGSKSGTSASLAITGLQAE |
| | | DEADYYCQSYDRYTHPALLFGTGTKVTVLggggsggggsggggsQVQLVESGGGVV |
| | | QPGRSLRLSCAASGFTFSSYGMHWVRQAPGKGLEWVAFIRYeGSNKYYAeSV |
| | | KGRFTISRDNSKNTLYLQMNSLRAEDTAVYYCKTHGSHDNWGQGTMVTVSS |
| | | ** |
| 462 | WW0667 | EVQLVESGGGLVQPGNSLRLSCAASGFTFSKFGMSWVRQAPGKGLEWVSSIS |
| | | GSGRDTLYAESVKGRFTISRDNAKTTLYLQMNSLRPEDTAVYYCTIGGSLSVS |
| | | SQGTLVTVSSsggpGPAGLYAQpgsiwelkkdvyvveldwypdapgemvvltcdtpeedgitwtldqs |
| | | sevlgsgktltiqvkefgdagqytchkggevlshsllllhkkedgiwstdilkdqkepknktflrceaknysgrftcwwltt |
| | | istdltfsvkssrgssdpqgvtcgaatlsaervrgdnkeyeysvecqedsacpaaeeslpievmvdavhklkyenytssf |
| | | firdiikpdppknlqlkplknsrqvevsweypdtwstphsyfsltfcvqvqgkskrekkdrvftdktsatvicrknasisv |
| | | raqdryyssswsewasvpcsggggsggggsggggsrnlpvatpdpgmfpclhhsqnllravsnmlqkarqtlelypc |
| | | tseeidheditkdktstveaclpleltknesclnsretsfitngsclasrktsfmmalclssiyedlkmyqvefktmnakllm |
| | | dpkrqifldqnmlavidelmqalnfnsetvpqkssleepdfyktkiklcillhafriravtidrvmsylnassggpGPA |
| | | GLYAQpgsggggsggggsggggsggggsggggsggggsQSVLTQPPSVSGAPGQRVTISCSG |
| | | SRSNIGdNTVKWYQQLPGTAPKLLIYYNDQRPSGVPDRFSGSKSGTSASLAITG |
| | | LQAEDEADYYCQSYDRYTHPALLFGTGTKVTVLggggsggggsggggsQVQLVESG |
| | | GGVVQPGRSLRLSCAASGFTFSSYGMHWVRQAPGKGLEWVAFIRYeGSNKYY |
| | | AeSVKGRFTISRDNSKNTLYLQMNSLRAEDTAVYYCKTHGSHDNWGQGTMV |
| | | TVSS** |
| 463 | WW0668 | EVQLVESGGGLVQPGNSLRLSCAASGFTFSKFGMSWVRQAPGKGLEWVSSIS |
| | | GSGRDTLYAESVKGRFTISRDNAKTTLYLQMNSLRPEDTAVYYCTIGGSLSVS |
| | | SQGTLVTVSSsggpGPAGLYAQpgsiwelkkdvyvveldwypdapgemvvltcdtpeedgitwtldqs |
| | | sevlgsgktltiqvkefgdagqytchkggevlshsllllhkkedgiwstdilkdqkepknktflrceaknysgrftcwwltt |
| | | istdltfsvkssrgssdpqgvtcgaatlsaervrgdnkeyeysvecqedsacpaaeeslpievmvdavhklkyenytssf |
| | | firdiikpdppknlqlkplknsrqvevsweypdtwstphsyfsltfcvqvqgkskrekkdrvftdktsatvicrknasisv |
| | | raqdryyssswsewasvpcsggggsggggsggggsrvipvsgparclsqsrnllkttddmvktareklkhysctaedi |
| | | dheditrdqtstlktclplelhknesclatretssttrgsclppqktslmmtlclgsiyedlkmyqtefqainaalqnlmhqqi |
| | | ildkgmlvaidelmqslnhngetlrqkppvgeadpyrvkmklcillhafstrvvtinrvmgylssasggpGPAGLY |
| | | AQpgsggggsggggsggggsggggsggggsggggsQSVLTQPPSVSGAPGQRVTISCSGSRSN |
| | | IGdeTVKWYQQLPGTAPKLLIYYNDQRPSGVPDRFSGSKSGTSASLAITGLQAE |
| | | DEADYYCQSYDRYTHPALLFGTGTKVTVLggggsggggsggggsQVQLVESGGGVV |
| | | QPGRSLRLSCAASGFTFSSYGMHWVRQAPGKGLEWVAFIRYDGSNKYYADS |
| | | VKGRFTISRDNSKNTLYLQMNSLRAEDTAVYYCKTHGSHDNWGQGTMVTVS |
| | | S** |
| 464 | WW0669 | EVQLVESGGGLVQPGNSLRLSCAASGFTFSKFGMSWVRQAPGKGLEWVSSIS |
| | | GSGRDTLYAESVKGRFTISRDNAKTTLYLQMNSLRPEDTAVYYCTIGGSLSVS |
| | | SQGTLVTVSSsggpGPAGLYAQpgsiwelkkdvyvveldwypdapgemvvltcdtpeedgitwtldqs |
| | | sevlgsgktltiqvkefgdagqytchkggevlshsllllhkkedgiwstdilkdqkepknktflrceaknysgrftcwwltt |
| | | istdltfsvkssrgssdpqgvtcgaatlsaervrgdnkeyeysvecqedsacpaaeeslpievmvdavhklkyenytssf |
| | | firdiikpdppknlqlkplknsrqvevsweypdtwstphsyfsltfcvqvqgkskrekkdrvftdktsatvicrknasisv |
| | | raqdryyssswsewasvpcsggggsggggsggggsrnlpvatpdpgmfpclhhsqnllravsnmlqkarqtlelypc |
| | | tseeidheditkdktstveaclpleltknesclnsretsfitngsclasrktsfmmalclssiyedlkmyqvefktmnakllm |
| | | dpkrqifldqnmlavidelmqalnfnsetvpqkssleepdfyktkiklcillhafriravtidrvmsylnassggpGPA |
| | | GLYAQpgsggggsggggsggggsggggsggggsggggsQSVLTQPPSVSGAPGQRVTISCSG |
| | | SRSNIGdeTVKWYQQLPGTAPKLLIYYNDQRPSGVPDRFSGSKSGTSASLAITG |
| | | LQAEDEADYYCQSYDRYTHPALLFGTGTKVTVLggggsggggsggggsQVQLVESG |
| | | GGVVQPGRSLRLSCAASGFTFSSYGMHWVRQAPGKGLEWVAFIRYDGSNKY |
| | | YADSVKGRFTISRDNSKNTLYLQMNSLRAEDTAVYYCKTHGSHDNWGQGTM |
| | | VTVSS** |
| 465 | WW0670 | EVQLVESGGGLVQPGNSLRLSCAASGFTFSKFGMSWVRQAPGKGLEWVSSIS |
| | | GSGRDTLYAESVKGRFTISRDNAKTTLYLQMNSLRPEDTAVYYCTIGGSLSVS |
| | | SQGTLVTVSSsggpGPAGLYAQpgsiwelkkdvyvveldwypdapgemvvltcdtpeedgitwtldqs |
| | | sevlgsgktltiqvkefgdagqytchkggevlshsllllhkkedgiwstdilkdqkepknktflrceaknysgrftcwwltt |
| | | istdltfsvkssrgssdpqgvtcgaatlsaervrgdnkeyeysvecqedsacpaaeeslpievmvdavhklkyenytssf |
| | | firdiikpdppknlqlkplknsrqvevsweypdtwstphsyfsltfcvqvqgkskrekkdrvftdktsatvicrknasisv |
| | | raqdryyssswsewasvpcsggggsggggsggggsrvipvsgparclsqsrnllkttddmvktareklkhysctaedi |
| | | dheditrdqtstlktclplelhknesclatretssttrgsclppqktslmmtlclgsiyedlkmyqtefqainaalqnlmhqqi |
| | | ildkgmlvaidelmqslnhngetlrqkppvgeadpyrvkmklcillhafstrvvtinrvmgylssasggpGPAGLY |
| | | AQpgsggggsggggsggggsggggsggggsggggsQSVLTQPPSVSGAPGQRVTISCSGSRSN |
| | | IGdeTVKWYQQLPGTAPKLLIYYNDQRPSGVPDRFSGSKSGTSASLAITGLQAE |
| | | DEADYYCQSYDRYTHPALLFGTGTKVTVLggggsggggsggggsQVQLVESGGGVV |
| | | QPGRSLRLSCAASGFTFSSYGMHWVRQAPGKGLEWVAFIRYeGSNKYYAeSV |
| | | KGRFTISRDNSKNTLYLQMNSLRAEDTAVYYCKTHGSHDNWGQGTMVTVSS |
| | | ** |
| 466 | WW0671 | EVQLVESGGGLVQPGNSLRLSCAASGFTFSKFGMSWVRQAPGKGLEWVSSIS |
| | | GSGRDTLYAESVKGRFTISRDNAKTTLYLQMNSLRPEDTAVYYCTIGGSLSVS |
| | | SQGTLVTVSSsggpGPAGLYAQpgsiwelkkdvyvveldwypdapgemvvltcdtpeedgitwtldqs |
| | | sevlgsgktltiqvkefgdagqytchkggevlshsllllhkkedgiwstdilkdqkepknktflrceaknysgrftcwwltt |
| | | istdltfsvkssrgssdpqgvtcgaatlsaervrgdnkeyeysvecqedsacpaaeeslpievmvdavhklkyenytssf |
| | | firdiikpdppknlqlkplknsrqvevsweypdtwstphsyfsltfcvqvqgkskrekkdrvftdktsatvicrknasisv |
| | | raqdryyssswsewasvpcsggggsggggsggggsrnlpvatpdpgmfpclhhsqnllravsnmlqkarqtlefypc |
| | | tseeidheditkdktstveaclpleltknesclnsretsfitngsclasrktsfmmalclssiyedlkmyqvefktmnakllm |
| | | dpkrqifldqnmlavidelmqalnfnsetvpqkssleepdfyktkiklcillhafriravtidrvmsylnassggpGPA |
| | | GLYAQpgsggggsggggsggggsggggsggggsggggsQSVLTQPPSVSGAPGQRVTISCSG |
| | | SRSNIGdeTVKWYQQLPGTAPKLLIYYNDQRPSGVPDRFSGSKSGTSASLAITG |
| | | LQAEDEADYYCQSYDRYTHPALLFGTGTKVTVLggggsggggsggggsQVQLVESG |
| | | GGVVQPGRSLRLSCAASGFTFSSYGMHWVRQAPGKGLEWVAFIRYeGSNKYY |
| | | AeSVKGRFTISRDNSKNTLYLQMNSLRAEDTAVYYCKTHGSHDNWGQGTMV |
| | | TVSS** |
| 467 | WW0672 | EVQLVESGGGLVQPGNSLRLSCAASGFTFSKFGMSWVRQAPGKGLEWVSSIS |
| | | GSGRDTLYAESVKGRFTISRDNAKTTLYLQMNSLRPEDTAVYYCTIGGSLSVS |
| | | SQGTLVTVSSsggpGPAGLYAQpgsiwelkkdvyvveldwypdapgemvvltcdtpeedgitwtldqs |
| | | sevlgsgktltiqvkefgdagqytchkggevlshsllllhkkedgiwstdilkdqkepknktflrceaknysgrftcwwltt |
| | | istdltfsvkssrgssdpqgvtcgaatlsaervrgdnkeyeysvecqedsacpaaeeslpievmvdavhklkyenytssf |
| | | firdiikpdppknlqlkplknsrqvevsweypdtwstphsyfsltfcvqvqgkskrekkdrvftdktsatvicrknasisv |
| | | raqdryyssswsewasvpcsggggsggggsggggsrvipvsgparclsqsrnllkttddmvktareklkhysctaedi |
| | | dheditrdqtstlktclplelhknesclatretssttrgsclppqktslmmtlclgsiyedlkmyqtefqainaalqnlmhqqi |
| | | ildkgmlvaidelmqslnhngetlrqkppvgeadpyrvkmklcillhafstrvvtinrvmgylssasggpGPAGLY |
| | | AQpgsggggsggggsggggsggggsggggsggggsQSVLTQPPSVSGAPGQRVTISCSGSeSN |
| | | IGSNdVKWYQQLPGTAPKLLIYYNDQRPSGVPDRFSGSKSGTSASLAITGLQAE |
| | | DEADYYCQSYDRYTHPALLFGTGTKVTVLggggsggggsggggsQVQLVESGGGVV |
| | | QPGRSLRLSCAASGFTFSSYGMHWVRQAPGKGLEWVAFIRYDGSNKYYADS |
| | | VKGRFTISRDNSKNTLYLQMNSLRAEDTAVYYCKTHGSHDNWGQGTMVTVS |
| | | S** |
| 468 | WW0673 | EVQLVESGGGLVQPGNSLRLSCAASGFTFSKFGMSWVRQAPGKGLEWVSSIS |
| | | GSGRDTLYAESVKGRFTISRDNAKTTLYLQMNSLRPEDTAVYYCTIGGSLSVS |
| | | SQGTLVTVSSsggpGPAGLYAQpgsiwelkkdvyvveldwypdapgemvvltcdtpeedgitwtldqs |
| | | sevlgsgktltiqvkefgdagqytchkggevlshsllllhkkedgiwstdilkdqkepknktflrceaknysgrftcwwltt |
| | | istdltfsvkssrgssdpqgvtcgaatlsaervrgdnkeyeysvecqedsacpaaeeslpievmvdavhklkyenytssf |
| | | firdiikpdppknlqlkplknsrqvevsweypdtwstphsyfsltfcvqvqgkskrekkdrvftdktsatvicrknasisv |
| | | raqdryyssswsewasvpcsggggsggggsggggsrnlpvatpdpgmfpclhhsqnllravsnmlqkarqtlefypc |
| | | tseeidheditkdktstveaclpleltknesclnsretsfitngsclasrktsfmmalclssiyedlkmyqvefktmnakllm |
| | | dpkrqifldqnmlavidelmqalnfnsetvpqkssleepdfyktkiklcillhafriravtidrvmsylnassggpGPA |
| | | GLYAQpgsggggsggggsggggsggggsggggsggggsQSVLTQPPSVSGAPGQRVTISCSG |
| | | SeSNIGSNdVKWYQQLPGTAPKLLIYYNDQRPSGVPDRFSGSKSGTSASLAITG |
| | | LQAEDEADYYCQSYDRYTHPALLFGTGTKVTVLggggsggggsggggsQVQLVESG |
| | | GGVVQPGRSLRLSCAASGFTFSSYGMHWVRQAPGKGLEWVAFIRYDGSNKY |
| | | YADSVKGRFTISRDNSKNTLYLQMNSLRAEDTAVYYCKTHGSHDNWGQGTM |
| | | VTVSS** |
| 469 | WW0674 | EVQLVESGGGLVQPGNSLRLSCAASGFTFSKFGMSWVRQAPGKGLEWVSSIS |
| | | GSGRDTLYAESVKGRFTISRDNAKTTLYLQMNSLRPEDTAVYYCTIGGSLSVS |
| | | SQGTLVTVSSsggpGPAGLYAQpgsiwelkkdvyvveldwypdapgemvvltcdtpeedgitwtldqs |
| | | sevlgsgktltiqvkefgdagqytchkggevlshsllllhkkedgiwstdilkdqkepknktflrceaknysgrftcwwltt |
| | | istdltfsvkssrgssdpqgvtcgaatlsaervrgdnkeyeysvecqedsacpaaeeslpievmvdavhklkyenytssf |
| | | firdiikpdppknlqlkplknsrqvevsweypdtwstphsyfsltfcvqvqgkskrekkdrvftdktsatvicrknasisv |
| | | raqdryyssswsewasvpcsggggsggggsggggsrvipvsgparclsqsrnllkttddmvktareklkhysctaedi |
| | | dheditrdqtstlktclplelhknesclatretssttrgsclppqktslmmtlclgsiyedlkmyqtefqainaalqnlmhqqi |
| | | ildkgmlvaidelmqslnhngetlrqkppvgeadpyrvkmklcillhafstrvvtinrvmgylssasggpGPAGLY |
| | | AQpgsggggsggggsggggsggggsggggsggggsQSVLTQPPSVSGAPGQRVTISCSGSRSN |
| | | IGeNTVKWYQQLPGTAPKLLIYYNDQRPSGVPDRFSGSKSGTSASLAITGLQAE |
| | | DEADYYCQSYDRYTHPALLFGTGTKVTVLggggsggggsggggsQVQLVESGGGVV |
| | | QPGRSLRLSCAASGFTFSSYGMHWVRQAPGKGLEWVAFIRYeGSNKYYAeSV |
| | | KGRFTISRDNSKNTLYLQMNSLRAEDTAVYYCKTHGSHDNWGQGTMVTVSS |
| | | ** |
| 470 | WW0675 | EVQLVESGGGLVQPGNSLRLSCAASGFTFSKFGMSWVRQAPGKGLEWVSSIS |
| | | GSGRDTLYAESVKGRFTISRDNAKTTLYLQMNSLRPEDTAVYYCTIGGSLSVS |
| | | SQGTLVTVSSsggpGPAGLYAQpgsiwelkkdvyvveldwypdapgemvvltcdtpeedgitwtldqs |
| | | sevlgsgktltiqvkefgdagqytchkggevlshsllllhkkedgiwstdilkdqkepknktflrceaknysgrftcwwltt |
| | | istdltfsvkssrgssdpqgvtcgaatlsaervrgdnkeyeysvecqedsacpaaeeslpievmvdavhklkyenytssf |
| | | firdiikpdppknlqlkplknsrqvevsweypdtwstphsyfsltfcvqvqgkskrekkdrvftdktsatvicrknasisv |
| | | raqdryyssswsewasvpcsggggsggggsggggsrnlpvatpdpgmfpclhhsqnllravsnmlqkarqtlelypc |
| | | tseeidheditkdktstveaclpleltknesclnsretsfitngsclasrktsfmmalclssiyedlkmyqvefktmnakllm |
| | | dpkrqifldqnmlavidelmqalnfnsetvpqkssleepdfyktkiklcillhafriravtidrvmsylnassggpGPA |
| | | GLYAQpgsggggsggggsggggsggggsggggsggggsQSVLTQPPSVSGAPGQRVTISCSG |
| | | SRSNIGeNTVKWYQQLPGTAPKLLIYYNDQRPSGVPDRFSGSKSGTSASLAITG |
| | | LQAEDEADYYCQSYDRYTHPALLFGTGTKVTVLggggsggggsggggsQVQLVESG |
| | | GGVVQPGRSLRLSCAASGFTFSSYGMHWVRQAPGKGLEWVAFIRYeGSNKYY |
| | | AeSVKGRFTISRDNSKNTLYLQMNSLRAEDTAVYYCKTHGSHDNWGQGTMV |
| | | TVSS** |
| 471 | WW0676 | EVQLVESGGGLVQPGNSLRLSCAASGFTFSKFGMSWVRQAPGKGLEWVSSIS |
| | | GSGRDTLYAESVKGRFTISRDNAKTTLYLQMNSLRPEDTAVYYCTIGGSLSVS |
| | | SQGTLVTVSSsggpGPAGLYAQpgsiwelkkdvyvveldwypdapgemvvltcdtpeedgitwtldqs |
| | | sevlgsgktltiqvkefgdagqytchkggevlshsllllhkkedgiwstdilkdqkepknktflrceaknysgrftcwwltt |
| | | istdltfsvkssrgssdpqgvtcgaatlsaervrgdnkeyeysvecqedsacpaaeeslpievmvdavhklkyenytssf |
| | | firdiikpdppknlqlkplknsrqvevsweypdtwstphsyfsltfcvqvqgkskrekkdrvftdktsatvicrknasisv |
| | | raqdryyssswsewasvpcsggggsggggsggggsrvipvsgparclsqsrnllkttddmvktareklkhysctaedi |
| | | dheditrdqtstlktclplelhknesclatretssttrgsclppqktslmmtlclgsiyedlkmyqtefqainaalqnlmhqqi |
| | | ildkgmlvaidelmqslnhngetlrqkppvgeadpyrvkmklcillhafstrvvtinrvmgylssasggpGPAGLY |
| | | AQpgsggggsggggsggggsggggsggggsggggsQSVLTQPPSVSGAPGQRVTISCSGSRSN |
| | | IGeeTVKWYQQLPGTAPKLLIYYNDQRPSGVPDRFSGSKSGTSASLAITGLQAE |
| | | DEADYYCQSYDRYTHPALLFGTGTKVTVLggggsggggsggggsQVQLVESGGGVV |
| | | QPGRSLRLSCAASGFTFSSYGMHWVRQAPGKGLEWVAFIRYDGSNKYYADS |
| | | VKGRFTISRDNSKNTLYLQMNSLRAEDTAVYYCKTHGSHDNWGQGTMVTVS |
| | | S** |
| 472 | WW0677 | EVQLVESGGGLVQPGNSLRLSCAASGFTFSKFGMSWVRQAPGKGLEWVSSIS |
| | | GSGRDTLYAESVKGRFTISRDNAKTTLYLQMNSLRPEDTAVYYCTIGGSLSVS |
| | | SQGTLVTVSSsggpGPAGLYAQpgsiwelkkdvyvveldwypdapgemvvltcdtpeedgitwtldqs |
| | | sevlgsgktltiqvkefgdagqytchkggevlshsllllhkkedgiwstdilkdqkepknktflrceaknysgrftcwwltt |
| | | istdltfsvkssrgssdpqgvtcgaatlsaervrgdnkeyeysvecqedsacpaaeeslpievmvdavhklkyenytssf |
| | | firdiikpdppknlqlkplknsrqvevsweypdtwstphsyfsltfcvqvqgkskrekkdrvftdktsatvicrknasisv |
| | | raqdryyssswsewasvpcsggggsggggsggggsrnlpvatpdpgmfpclhhsqnllravsnmlqkarqtlefypc |
| | | tseeidheditkdktstveaclpleltknesclnsretsfitngsclasrktsfmmalclssiyedlkmyqvefktmnakllm |
| | | dpkrqifldqnmlavidelmqalnfnsetvpqkssleepdfyktkiklcillhafriravtidrvmsylnassggpGPA |
| | | GLYAQpgsggggsggggsggggsggggsggggsggggsQSVLTQPPSVSGAPGQRVTISCSG |
| | | SRSNIGeeTVKWYQQLPGTAPKLLIYYNDQRPSGVPDRFSGSKSGTSASLAITGL |
| | | QAEDEADYYCQSYDRYTHPALLFGTGTKVTVLggggsggggsggggsQVQLVESGG |
| | | GVVQPGRSLRLSCAASGFTFSSYGMHWVRQAPGKGLEWVAFIRYDGSNKYY |
| | | ADSVKGRFTISRDNSKNTLYLQMNSLRAEDTAVYYCKTHGSHDNWGQGTMV |
| | | TVSS** |
| 473 | WW0678 | EVQLVESGGGLVQPGNSLRLSCAASGFTFSKFGMSWVRQAPGKGLEWVSSIS |
| | | GSGRDTLYAESVKGRFTISRDNAKTTLYLQMNSLRPEDTAVYYCTIGGSLSVS |
| | | SQGTLVTVSSsggpGPAGLYAQpgsiwelkkdvyvveldwypdapgemvvltcdtpeedgitwtldqs |
| | | sevlgsgktltiqvkefgdagqytchkggevlshsllllhkkedgiwstdilkdqkepknktflrceaknysgrftcwwltt |
| | | istdltfsvkssrgssdpqgvtcgaatlsaervrgdnkeyeysvecqedsacpaaeeslpievmvdavhklkyenytssf |
| | | firdiikpdppknlqlkplknsrqvevsweypdtwstphsyfsltfcvqvqgkskrekkdrvftdktsatvicrknasisv |
| | | raqdryyssswsewasvpcsggggsggggsggggsrvipvsgparclsqsrnllkttddmvktareklkhysctaedi |
| | | dheditrdqtstlktclplelhknesclatretssttrgsclppqktslmmtlclgsiyedlkmyqtefqainaalqnhnhqqi |
| | | ildkgmlvaidelmqslnhngetlrqkppvgeadpyrvkmklcillhafstrvvtinrvmgylssasggpGPAGLY |
| | | AQpgsggggsggggsggggsggggsggggsggggsQSVLTQPPSVSGAPGQRVTISCSGSRSN |
| | | IGSeTVKWYQQLPGTAPKLLIYYNDQRPSGVPDRFSGSKSGTSASLAITGLQAE |
| | | DEADYYCQSYDRYTHPALLFGTGTKVTVLggggsggggsggggsQVQLVESGGGVV |
| | | QPGRSLRLSCAASGFTFSSYGMHWVRQAPGKGLEWVAFIRYeGSNKYYADSV |
| | | KGRFTISRDNSKNTLYLQMNSLRAEDTAVYYCKTHGSHDNWGQGTMVTVSS |
| | | ** |
| 474 | WW0679 | EVQLVESGGGLVQPGNSLRLSCAASGFTFSKFGMSWVRQAPGKGLEWVSSIS |
| | | GSGRDTLYAESVKGRFTISRDNAKTTLYLQMNSLRPEDTAVYYCTIGGSLSVS |
| | | SQGTLVTVSSsggpGPAGLYAQpgsiwelkkdvyvveldwypdapgemvvltcdtpeedgitwtldqs |
| | | sevlgsgktltiqvkefgdagqytchkggevlshsllllhkkedgiwstdilkdqkepknktflrceaknysgrftcwwltt |
| | | istdltfsvkssrgssdpqgvtcgaatlsaervrgdnkeyeysvecqedsacpaaeeslpievmvdavhklkyenytssf |
| | | firdiikpdppknlqlkplknsrqvevsweypdtwstphsyfsltfcvqvqgkskrekkdrvftdktsatvicrknasisv |
| | | raqdryyssswsewasvpcsggggsggggsggggsrnlpvatpdpgmfpclhhsqnllravsnmlqkarqtlefypc |
| | | tseeidheditkdktstveaclpleltknesclnsretsfitngsclasrktsfmmalclssiyedlkmyqvefktmnakllm |
| | | dpkrqifldqnmlavidelmqalnfnsetvpqkssleepdfyktkiklcillhafriravtidrvmsylnassggpGPA |
| | | GLYAQpgsggggsggggsggggsggggsggggsggggsQSVLTQPPSVSGAPGQRVTISCSG |
| | | SRSNIGSeTVKWYQQLPGTAPKLLIYYNDQRPSGVPDRFSGSKSGTSASLAITG |
| | | LQAEDEADYYCQSYDRYTHPALLFGTGTKVTVLggggsggggsggggsQVQLVESG |
| | | GGVVQPGRSLRLSCAASGFTFSSYGMHWVRQAPGKGLEWVAFIRYeGSNKYY |
| | | ADSVKGRFTISRDNSKNTLYLQMNSLRAEDTAVYYCKTHGSHDNWGQGTMV |
| | | TVSS** |
| 475 | WW0680 | EVQLVESGGGLVQPGNSLRLSCAASGFTFSKFGMSWVRQAPGKGLEWVSSIS |
| | | GSGRDTLYAESVKGRFTISRDNAKTTLYLQMNSLRPEDTAVYYCTIGGSLSVS |
| | | SQGTLVTVSSsggpALFKSSFPpgsiwelkkdvyvveldwypdapgemvvltcdtpeedgitwtldqss |
| | | evlgsgktltiqvkefgdagqytchkggevlshsllllhkkedgiwstdilkdqkepknktflrceaknysgrftcwwltti |
| | | stdltfsvkssrgssdpqgvtcgaatlsaervrgdnkeyeysvecqedsacpaaeeslpievmvdavhklkyenytssff |
| | | irdiikpdppknlqlkplknsrqvevsweypdtwstphsyfsltfcvqvqgkskrekkdrvftdktsatvicrknasisvr |
| | | aqdryyssswsewasvpcsggggsggggsggggsrvipvsgparclsqsrnllkttddmvktareklkhysctaedid |
| | | heditrdqtstlktclplelhknesclatretssttrgsclppqktslmmtlclgsiyedlkmyqtefqainaalqnlmhqqiil |
| | | dkgmlvaidelmqslnhngetlrqkppvgeadpyrvkmklcillhafstrvvtinrvmgylssasggpALFKSSF |
| | | PpgsggggsggggsggggsggggsggggsggggsQSVLTQPPSVSGAPGQRVTISCSGSRSNI |
| | | GSNTVKWYQQLPGTAPKLLIYYNDQRPSGVPDRFSGSKSGTSASLAITGLQAE |
| | | DEADYYCQSYDRYTHPALLFGTGTKVTVLggggsggggsggggsQVQLVESGGGVV |
| | | QPGRSLRLSCAASGFTFSSYGMHWVRQAPGKGLEWVAFIRYeGSNKYYAeSV |
| | | KGRFTISRDNSKNTLYLQMNSLRAEDTAVYYCKTHGSHDNWGQGTMVTVSS |
| | | ** |
| 476 | WW0681 | EVQLVESGGGLVQPGNSLRLSCAASGFTFSKFGMSWVRQAPGKGLEWVSSIS |
| | | GSGRDTLYAESVKGRFTISRDNAKTTLYLQMNSLRPEDTAVYYCTIGGSLSVS |
| | | SQGTLVTVSSsggpALFKSSFPpgsiwelkkdvyvveldwypdapgemvvltcdtpeedgitwtldqss |
| | | evlgsgktltiqvkefgdagqytchkggevlshsllllhkkedgiwstdilkdqkepknktflrceaknysgrftcwwltti |
| | | stdltfsvkssrgssdpqgvtcgaatlsaervrgdnkeyeysvecqedsacpaaeeslpievmvdavhklkyenytssff |
| | | irdiikpdppknlqlkplknsrqvevsweypdtwstphsyfsltfcvqvqgkskrekkdrvftdktsatvicrknasisvr |
| | | aqdryyssswsewasvpcsggggsggggsggggsrnlpvatpdpgmfpclhhsqnllravsnmlqkarqtlefypct |
| | | seeidheditkdktstveaclpleltknesclnsretsfitngsclasrktsfmmalclssiyedlkmyqvefktmnakllm |
| | | dpkrqifldqnmlavidelmqalnfnsetvpqkssleepdfyktkiklcillhafriravtidrvmsylnassggpALFK |
| | | SSFPpgsggggsggggsggggsggggsggggsggggsQSVLTQPPSVSGAPGQRVTISCSGSRS |
| | | NIGSNTVKWYQQLPGTAPKLLIYYNDQRPSGVPDRFSGSKSGTSASLAITGLQ |
| | | AEDEADYYCQSYDRYTHPALLFGTGTKVTVLggggsggggsggggsQVQLVESGGG |
| | | VVQPGRSLRLSCAASGFTFSSYGMHWVRQAPGKGLEWVAFIRYeGSNKYYAe |
| | | SVKGRFTISRDNSKNTLYLQMNSLRAEDTAVYYCKTHGSHDNWGQGTMVTV |
| | | SS** |
| 477 | WW0682 | EVQLVESGGGLVQPGNSLRLSCAASGFTFSKFGMSWVRQAPGKGLEWVSSIS |
| | | GSGRDTLYAESVKGRFTISRDNAKTTLYLQMNSLRPEDTAVYYCTIGGSLSVS |
| | | SQGTLVTVSSsggpALFKSSFPpgsiwelkkdvyvveldwypdapgemvvltcdtpeedgitwtldqss |
| | | evlgsgktltiqvkefgdagqytchkggevlshsllllhkkedgiwstdilkdqkepknktflrceaknysgrftcwwltti |
| | | stdltfsvkssrgssdpqgvtcgaatlsaervrgdnkeyeysvecqedsacpaaeeslpievmvdavhklkyenytssff |
| | | irdiikpdppknlqlkplknsrqvevsweypdtwstphsyfsltfcvqvqgkskrekkdrvftdktsatvicrknasisvr |
| | | aqdryyssswsewasvpcsggggsggggsggggsrvipvsgparclsqsrnllkttddmvktareklkhysctaedid |
| | | heditrdqtstlktclplelhknesclatretssttrgsclppqktslmmtlclgsiyedlkmyqtefqainaalqnhnhqqiil |
| | | dkgmlvaidelmqslnhngetlrqkppvgeadpyrvkmklcillhafstrvvtinrvmgylssasggpALFKSSF |
| | | PpgsggggsggggsggggsggggsggggsggggsQSVLTQPPSVSGAPGQRVTISCSGSRSNI |
| | | GSeTVKWYQQLPGTAPKLLIYYNDQRPSGVPDRFSGSKSGTSASLAITGLQAE |
| | | DEADYYCQSYDRYTHPALLFGTGTKVTVLggggsggggsggggsQVQLVESGGGVV |
| | | QPGRSLRLSCAASGFTFSSYGMHWVRQAPGKGLEWVAFIRYeGSNKYYAeSV |
| | | KGRFTISRDNSKNTLYLQMNSLRAEDTAVYYCKTHGSHDNWGQGTMVTVSS |
| | | ** |
| 635 | WW0683 | EVQLVESGGGLVQPGNSLRLSCAASGFTFSKFGMSWVRQAPGKGLEWVSSIS |
| | | GSGRDTLYAESVKGRFTISRDNAKTTLYLQMNSLRPEDTAVYYCTIGGSLSVS |
| | | SQGTLVTVSSsggpALFKSSFPpgsiwelkkdvyvveldwypdapgemvvltcdtpeedgitwtldqss |
| | | evlgsgktltiqvkefgdagqytchkggevlshsllllhkkedgiwstdilkdqkepknktflrceaknysgrftcwwltti |
| | | stdltfsvkssrgssdpqgvtcgaatlsaervrgdnkeyeysvecqedsacpaaeeslpievmvdavhklkyenytssff |
| | | irdiikpdppknlqlkplknsrqvevsweypdtwstphsyfsltfcvqvqgkskrekkdrvftdktsatvicrknasisvr |
| | | aqdryyssswsewasvpcsggggsggggsggggsrnlpvatpdpgmfpclhhsqnllravsnmlqkarqtlefypct |
| | | seeidheditkdktstveaclpleltknesclnsretsfitngsclasrktsfmmalclssiyedlkmyqvefktmnakllm |
| | | dpkrqifldqnmlavidelmqalnfnsetvpqkssleepdfyktkiklcillhafriravtidrvmsylnassggpALFK |
| | | SSFPpgsggggsggggsggggsggggsggggsggggsQSVLTQPPSVSGAPGQRVTISCSGSRS |
| | | NIGSeTVKWYQQLPGTAPKLLIYYNDQRPSGVPDRFSGSKSGTSASLAITGLQA |
| | | EDEADYYCQSYDRYTHPALLFGTGTKVTVLggggsggggsggggsQVQLVESGGGV |
| | | VQPGRSLRLSCAASGFTFSSYGMHWVRQAPGKGLEWVAFIRYeGSNKYYAeS |
| | | VKGRFTISRDNSKNTLYLQMNSLRAEDTAVYYCKTHGSHDNWGQGTMVTVS |
| | | S** |
| 478 | WW0684 | EVQLVESGGGLVQPGNSLRLSCAASGFTFSKFGMSWVRQAPGKGLEWVSSIS |
| | | GSGRDTLYAESVKGRFTISRDNAKTTLYLQMNSLRPEDTAVYYCTIGGSLSVS |
| | | SQGTLVTVSSsggpALFKSSFPpgsiwelkkdvyvveldwypdapgemvvltcdtpeedgitwtldqss |
| | | evlgsgktltiqvkefgdagqytchkggevlshsllllhkkedgiwstdilkdqkepknktflrceaknysgrftcwwltti |
| | | stdltfsvkssrgssdpqgvtcgaatlsaervrgdnkeyeysvecqedsacpaaeeslpievmvdavhklkyenytssff |
| | | irdiikpdppknlqlkplknsrqvevsweypdtwtphsyfsltfcvqvqgkskrekkdrvftdktsatvicrknasisvr |
| | | aqdryyssswsewasvpcsggggsggggsggggsrvipvsgparclsqsrnllkttddmvktareklkhysctaedid |
| | | heditrdqtstlktclplelhknesclatretssttrgsclppqktslmmtlclgsiyedlkmyqtefqainaalqnhnhqqiil |
| | | dkgmlvaidelmqslnhngetlrqkppvgeadpyrvkmklcillhafstrvvtinrvmgylssasggpALFKSSF |
| | | PpgsggggsggggsggggsggggsggggsggggsQSVLTQPPSVSGAPGQRVTISCSGSRSNI |
| | | GdNTVKWYQQLPGTAPKLLIYYNDQRPSGVPDRFSGSKSGTSASLAITGLQAE |
| | | DEADYYCQSYDRYTHPALLFGTGTKVTVLggggsggggsggggsQVQLVESGGGVV |
| | | QPGRSLRLSCAASGFTFSSYGMHWVRQAPGKGLEWVAFIRYeGSNKYYAeSV |
| | | KGRFTISRDNSKNTLYLQMNSLRAEDTAVYYCKTHGSHDNWGQGTMVTVSS |
| | | ** |
| 479 | WW0685 | EVQLVESGGGLVQPGNSLRLSCAASGFTFSKFGMSWVRQAPGKGLEWVSSIS |
| | | GSGRDTLYAESVKGRFTISRDNAKTTLYLQMNSLRPEDTAVYYCTIGGSLSVS |
| | | SQGTLVTVSSsggpALFKSSFPpgsiwelkkdvyvveldwypdapgemvvltcdtpeedgitwtldqss |
| | | evlgsgktltiqvkefgdagqytchkggevlshsllllhkkedgiwstdilkdqkepknktflrceaknysgrftcwwltti |
| | | stdltfsvkssrgssdpqgvtcgaatlsaervrgdnkeyeysvecqedsacpaaeeslpievmvdavhklkyenytssff |
| | | irdiikpdppknlqlkplknsrqvevsweypdtwstphsyfsltfcvqvqgkskrekkdrvftdktsatvicrknasisvr |
| | | aqdryyssswsewasvpcsggggsggggsggggsrnlpvatpdpgmfpclhhsqnllravsnmlqkarqtlefypct |
| | | seeidheditkdktstveaclpleltknesclnsretsfitngsclasrktsfmmalclssiyedlkmyqvefktmnakllm |
| | | dpkrqifldqnmlavidelmqalnfnsetvpqkssleepdfyktkiklcillhafriravtidrvmsylnassggpALFK |
| | | SSFPpgsggggsggggsggggsggggsggggsggggsQSVLTQPPSVSGAPGQRVTISCSGSRS |
| | | NIGdNTVKWYQQLPGTAPKLLIYYNDQRPSGVPDRFSGSKSGTSASLAITGLQA |
| | | EDEADYYCQSYDRYTHPALLFGTGTKVTVLggggsggggsggggsQVQLVESGGGV |
| | | VQPGRSLRLSCAASGFTFSSYGMHWVRQAPGKGLEWVAFIRYeGSNKYYAeS |
| | | VKGRFTISRDNSKNTLYLQMNSLRAEDTAVYYCKTHGSHDNWGQGTMVTVS |
| | | S** |
| 480 | WW0686 | EVQLVESGGGLVQPGNSLRLSCAASGFTFSKFGMSWVRQAPGKGLEWVSSIS |
| | | GSGRDTLYAESVKGRFTISRDNAKTTLYLQMNSLRPEDTAVYYCTIGGSLSVS |
| | | SQGTLVTVSSsggpALFKSSFPpgsiwelkkdvyvveldwypdapgemvvltcdtpeedgitwtldqss |
| | | evlgsgktltiqvkefgdagqytchkggevlshsllllhkkedgiwstdilkdqkepknktflrceaknysgrftcwwltti |
| | | stdltfsvkssrgssdpqgvtcgaatlsaervrgdnkeyeysvecqedsacpaaeeslpievmvdavhklkyenytssff |
| | | irdiikpdppknlqlkplknsrqvevsweypdtwstphsyfsltfcvqvqgkskrekkdrvftdktsatvicrknasisvr |
| | | aqdryyssswsewasvpcsggggsggggsggggsrvipvsgparclsqsrnllkttddmvktareklkhysctaedid |
| | | heditrdqtstlktclplelhknesclatretssttrgsclppqktslmmtlclgsiyedlkmyqtefqainaalqnlmhqqiil |
| | | dkgmlvaidelmqslnhngetlrqkppvgeadpyrvkmklcillhafstrvvtinrvmgylssasggpALFKSSF |
| | | PpgsggggsggggsggggsggggsggggsggggsQSVLTQPPSVSGAPGQRVTISCSGSRSNI |
| | | GdeTVKWYQQLPGTAPKLLIYYNDQRPSGVPDRFSGSKSGTSASLAITGLQAED |
| | | EADYYCQSYDRYTHPALLFGTGTKVTVLggggSggggSggggSQVQLVESGGGVVQ |
| | | PGRSLRLSCAASGFTFSSYGMHWVRQAPGKGLEWVAFIRYDGSNKYYADSV |
| | | KGRFTISRDNSKNTLYLQMNSLRAEDTAVYYCKTHGSHDNWGQGTMVTVSS |
| | | ** |
| 481 | WW0687 | EVQLVESGGGLVQPGNSLRLSCAASGFTFSKFGMSWVRQAPGKGLEWVSSIS |
| | | GSGRDTLYAESVKGRFTISRDNAKTTLYLQMNSLRPEDTAVYYCTIGGSLSVS |
| | | SQGTLVTVSSsggpALFKSSFPpgsiwelkkdvyvveldwypdapgemvvltcdtpeedgitwtldqss |
| | | evlgsgktltiqvkefgdagqytchkggevlshsllllhkkedgiwstdilkdqkepknktflrceaknysgrftcwwltti |
| | | stdltfsvkssrgssdpqgvtcgaatlsaervrgdnkeyeysvecqedsacpaaeeslpievmvdavhklkyenytssff |
| | | irdiikpdppknlqlkplknsrqvevsweypdtwstphsyfsltfcvqvqgkskrekkdrvftdktsatvicrknasisvr |
| | | aqdryyssswsewasvpcsggggsggggsggggsrnlpvatpdpgmfpclhhsqnllravsnmlqkarqtlefypct |
| | | seeidheditkdktstveaclpleltknesclnsretsfitngsclasrktsfmmalclssiyedlkmyqvefktmnakllm |
| | | dpkrqifldqnmlavidelmqalnfnsetvpqkssleepdfyktkiklcillhafriravtidrvmsylnassggpALFK |
| | | SSFPpgsggggsggggsggggsggggsggggsggggsQSVLTQPPSVSGAPGQRVTISCSGSRS |
| | | NIGdeTVKWYQQLPGTAPKLLIYYNDQRPSGVPDRFSGSKSGTSASLAITGLQA |
| | | EDEADYYCQSYDRYTHPALLFGTGTKVTVLggggsggggsggggsQVQLVESGGGV |
| | | VQPGRSLRLSCAASGFTFSSYGMHWVRQAPGKGLEWVAFIRYDGSNKYYAD |
| | | SVKGRFTISRDNSKNTLYLQMNSLRAEDTAVYYCKTHGSHDNWGQGTMVTV |
| | | SS** |
| 482 | WW0688 | EVQLVESGGGLVQPGNSLRLSCAASGFTFSKFGMSWVRQAPGKGLEWVSSIS |
| | | GSGRDTLYAESVKGRFTISRDNAKTTLYLQMNSLRPEDTAVYYCTIGGSLSVS |
| | | SQGTLVTVSSsggpALFKSSFPpgsiwelkkdvyvveldwypdapgemvvltcdtpeedgitwtldqss |
| | | evlgsgktltiqvkefgdagqytchkggevlshsllllhkkedgiwstdilkdqkepknktflrceaknysgrftcwwltti |
| | | stdltfsvkssrgssdpqgvtcgaatlsaervrgdnkeyeysvecqedsacpaaeeslpievmvdavhklkyenytssff |
| | | irdiikpdppknlqlkplknsrqvevsweypdtwstphsyfsltfcvqvqgkskrekkdrvftdktsatvicrknasisvr |
| | | aqdryyssswsewasvpcsggggsggggsggggsrvipvsgparclsqsrnllkttddmvktareklkhysctaedid |
| | | heditrdqtstlktclplelhknesclatretssttrgsclppqktslmmtlclgsiyedlkmyqtefqainaalqnlmhqqiil |
| | | dkgmlvaidelmqslnhngetlrqkppvgeadpyrvkmklcillhafstrvvtinrvmgylssasggpALFKSSF |
| | | PpgsggggsggggsggggsggggsggggsggggsQSVLTQPPSVSGAPGQRVTISCSGSRSNI |
| | | GdeTVKWYQQLPGTAPKLLIYYNDQRPSGVPDRFSGSKSGTSASLAITGLQAED |
| | | EADYYCQSYDRYTHPALLFGTGTKVTVLggggSggggSggggSQVQLVESGGGVVQ |
| | | PGRSLRLSCAASGFTFSSYGMHWVRQAPGKGLEWVAFIRYeGSNKYYAeSVK |
| | | GRFTISRDNSKNTLYLQMNSLRAEDTAVYYCKTHGSHDNWGQGTMVTVSS** |
| 483 | WW0689 | EVQLVESGGGLVQPGNSLRLSCAASGFTFSKFGMSWVRQAPGKGLEWVSSIS |
| | | GSGRDTLYAESVKGRFTISRDNAKTTLYLQMNSLRPEDTAVYYCTIGGSLSVS |
| | | SQGTLVTVSSsggpALFKSSFPpgsiwelkkdvyvveldwypdapgemvvltcdtpeedgitwtldqss |
| | | evlgsgktltiqvkefgdagqytchkggevlshsllllhkkedgiwstdilkdqkepknktflrceaknysgrftcwwltti |
| | | stdltfsvkssrgssdpqgvtcgaatlsaervrgdnkeyeysvecqedsacpaaeeslpievmvdavhklkyenytssff |
| | | irdiikpdppknlqlkplknsrqvevsweypdtwstphsyfsltfcvqvqgkskrekkdrvftdktsatvicrknasisvr |
| | | aqdryyssswsewasvpcsggggsggggsggggsrnlpvatpdpgmfpclhhsqnllravsnmlqkarqtlefypct |
| | | seeidheditkdktstveaclpleltknesclnsretsfitngsclasrktsfmmalclssiyedlkmyqvefktmnakllm |
| | | dpkrqifldqnmlavidelmqalnfnsetvpqkssleepdfyktkiklcillhafriravtidrvmsylnassggpALFK |
| | | SSFPpgsggggsggggsggggsggggsggggsggggsQSVLTQPPSVSGAPGQRVTISCSGSRS |
| | | NIGdeTVKWYQQLPGTAPKLLIYYNDQRPSGVPDRFSGSKSGTSASLAITGLQA |
| | | EDEADYYCQSYDRYTHPALLFGTGTKVTVLggggsggggsggggsQVQLVESGGGV |
| | | VQPGRSLRLSCAASGFTFSSYGMHWVRQAPGKGLEWVAFIRYeGSNKYYAeS |
| | | VKGRFTISRDNSKNTLYLQMNSLRAEDTAVYYCKTHGSHDNWGQGTMVTVS |
| | | S** |
| 484 | WW0690 | EVQLVESGGGLVQPGNSLRLSCAASGFTFSKFGMSWVRQAPGKGLEWVSSIS |
| | | GSGRDTLYAESVKGRFTISRDNAKTTLYLQMNSLRPEDTAVYYCTIGGSLSVS |
| | | SQGTLVTVSSsggpALFKSSFPpgsiwelkkdvyvveldwypdapgemvvltcdtpeedgitwtldqss |
| | | evlgsgktltiqvkefgdagqytchkggevlshsllllhkkedgiwstdilkdqkepknktflrceaknysgrftcwwltti |
| | | stdltfsvkssrgssdpqgvtcgaatlsaervrgdnkeyeysvecqedsacpaaeeslpievmvdavhklkyenytssff |
| | | irdiikpdppknlqlkplknsrqvevsweypdtwstphsyfsltfcvqvqgkskrekkdrvftdktsatvicrknasisvr |
| | | aqdryyssswsewasvpcsggggsggggsggggsrvipvsgparclsqsrnllkttddmvktareklkhysctaedid |
| | | heditrdqtstlktclplelhknesclatretssttrgsclppqktslmmtlclgsiyedlkmyqtefqainaalqnhnhqqiil |
| | | dkgmlvaidelmqslnhngetlrqkppvgeadpyrvkmklcillhafstrvvtinrvmgylssasggpALFKSSF |
| | | PpgsggggsggggsggggsggggsggggsggggsQSVLTQPPSVSGAPGQRVTISCSGSeSNIG |
| | | SNdVKWYQQLPGTAPKLLIYYNDQRPSGVPDRFSGSKSGTSASLAITGLQAED |
| | | EADYYCQSYDRYTHPALLFGTGTKVTVLggggSggggSggggSQVQLVESGGGVVQ |
| | | PGRSLRLSCAASGFTFSSYGMHWVRQAPGKGLEWVAFIRYDGSNKYYADSV |
| | | KGRFTISRDNSKNTLYLQMNSLRAEDTAVYYCKTHGSHDNWGQGTMVTVSS |
| | | ** |
| 485 | WW0691 | EVQLVESGGGLVQPGNSLRLSCAASGFTFSKFGMSWVRQAPGKGLEWVSSIS |
| | | GSGRDTLYAESVKGRFTISRDNAKTTLYLQMNSLRPEDTAVYYCTIGGSLSVS |
| | | SQGTLVTVSSsggpALFKSSFPpgsiwelkkdvyvveldwypdapgemvvltcdtpeedgitwtldqss |
| | | evlgsgktltiqvkefgdagqytchkggevlshsllllhkkedgiwstdilkdqkepknktflrceaknysgrftcwwltti |
| | | stdltfsvkssrgssdpqgvtcgaatlsaervrgdnkeyeysvecqedsacpaaeeslpievmvdavhklkyenytssff |
| | | irdiikpdppknlqlkplknsrqvevsweypdtwstphsyfsltfcvqvqgkskrekkdrvftdktsatvicrknasisvr |
| | | aqdryyssswsewasvpcsggggsggggsggggsrnlpvatpdpgmfpclhhsqnllravsnmlqkarqtlefypct |
| | | seeidheditkdktstveaclpleltknesclnsretsfitngsclasrktsfmmalclssiyedlkmyqvefktmnakllm |
| | | dpkrqifldqnmlavidelmqalnfnsetvpqkssleepdfyktkiklcillhafriravtidrvmsylnassggpALFK |
| | | SSFPpgsggggsggggsggggsggggsggggsggggsQSVLTQPPSVSGAPGQRVTISCSGSeS |
| | | NIGSNdVKWYQQLPGTAPKLLIYYNDQRPSGVPDRFSGSKSGTSASLAITGLQA |
| | | EDEADYYCQSYDRYTHPALLFGTGTKVTVLggggsggggsggggsQVQLVESGGGV |
| | | VQPGRSLRLSCAASGFTFSSYGMHWVRQAPGKGLEWVAFIRYDGSNKYYAD |
| | | SVKGRFTISRDNSKNTLYLQMNSLRAEDTAVYYCKTHGSHDNWGQGTMVTV |
| | | SS** |
| 486 | WW0692 | EVQLVESGGGLVQPGNSLRLSCAASGFTFSKFGMSWVRQAPGKGLEWVSSIS |
| | | GSGRDTLYAESVKGRFTISRDNAKTTLYLQMNSLRPEDTAVYYCTIGGSLSVS |
| | | SQGTLVTVSSsggpALFKSSFPpgsiwelkkdvyvveldwypdapgemvvltcdtpeedgitwtldqss |
| | | evlgsgktltiqvkefgdagqytchkggevlshsllllhkkedgiwstdilkdqkepknktflrceaknysgrftcwwltti |
| | | stdltfsvkssrgssdpqgvtcgaatlsaervrgdnkeyeysvecqedsacpaaeeslpievmvdavhklkyenytssff |
| | | irdiikpdppknlqlkplknsrqvevsweypdtwstphsyfsltfcvqvqgkskrekkdrvftdktsatvicrknasisvr |
| | | aqdryyssswsewasvpcsggggsggggsggggsrvipvsgparclsqsrnllkttddmvktareklkhysctaedid |
| | | heditrdqtstlktclplelhknesclatretssttrgsclppqktslmmtlclgsiyedlkmyqtefqainaalqnhnhqqiil |
| | | dkgmlvaidelmqslnhngetlrqkppvgeadpyrvkmklcillhafstrvvtinrvmgylssasggpALFKSSF |
| | | PpgsggggsggggsggggsggggsggggsggggsQSVLTQPPSVSGAPGQRVTISCSGSRSNI |
| | | GeNTVKWYQQLPGTAPKLLIYYNDQRPSGVPDRFSGSKSGTSASLAITGLQAE |
| | | DEADYYCQSYDRYTHPALLFGTGTKVTVLggggsggggsggggsQVQLVESGGGVV |
| | | QPGRSLRLSCAASGFTFSSYGMHWVRQAPGKGLEWVAFIRYeGSNKYYAeSV |
| | | KGRFTISRDNSKNTLYLQMNSLRAEDTAVYYCKTHGSHDNWGQGTMVTVSS |
| | | ** |
| 487 | WW0693 | EVQLVESGGGLVQPGNSLRLSCAASGFTFSKFGMSWVRQAPGKGLEWVSSIS |
| | | GSGRDTLYAESVKGRFTISRDNAKTTLYLQMNSLRPEDTAVYYCTIGGSLSVS |
| | | SQGTLVTVSSsggpALFKSSFPpgsiwelkkdvyvveldwypdapgemvvltcdtpeedgitwtldqss |
| | | evlgsgktltiqvkefgdagqytchkggevlshsllllhkkedgiwstdilkdqkepknktflrceaknysgrftcwwltti |
| | | stdltfsvkssrgssdpqgvtcgaatlsaervrgdnkeyeysvecqedsacpaaeeslpievmvdavhklkyenytssff |
| | | irdiikpdppknlqlkplknsrqvevsweypdtwstphsyfsltfcvqvqgkskrekkdrvftdktsatvicrknasisvr |
| | | aqdryyssswsewasvpcsggggsggggsggggsrnlpvatpdpgmfpclhhsqnllravsnmlqkarqtlefypct |
| | | seeidheditkdktstveaclpleltknesclnsretsfitngsclasrktsfmmalclssiyedlkmyqvefktmnakllm |
| | | dpkrqifldqnmlavidelmqalnfnsetvpqkssleepdfyktkiklcillhafriravtidrvmsylnassggpALFK |
| | | SSFPpgsggggsggggsggggsggggsggggsggggsQSVLTQPPSVSGAPGQRVTISCSGSRS |
| | | NIGeNTVKWYQQLPGTAPKLLIYYNDQRPSGVPDRFSGSKSGTSASLAITGLQA |
| | | EDEADYYCQSYDRYTHPALLFGTGTKVTVLggggsggggsggggsQVQLVESGGGV |
| | | VQPGRSLRLSCAASGFTFSSYGMHWVRQAPGKGLEWVAFIRYeGSNKYYAeS |
| | | VKGRFTISRDNSKNTLYLQMNSLRAEDTAVYYCKTHGSHDNWGQGTMVTVS |
| | | S** |
| 488 | WW0694 | EVQLVESGGGLVQPGNSLRLSCAASGFTFSKFGMSWVRQAPGKGLEWVSSIS |
| | | GSGRDTLYAESVKGRFTISRDNAKTTLYLQMNSLRPEDTAVYYCTIGGSLSVS |
| | | SQGTLVTVSSsggpALFKSSFPpgsiwelkkdvyvveldwypdapgemvvltcdtpeedgitwtldqss |
| | | evlgsgktltiqvkefgdagqytchkggevlshsllllhkkedgiwstdilkdqkepknktflrceaknysgrftcwwltti |
| | | stdltfsvkssrgssdpqgvtcgaatlsaervrgdnkeyeysvecqedsacpaaeeslpievmvdavhklkyenytssff |
| | | irdiikpdppknlqlkplknsrqvevsweypdtwstphsyfsltfcvqvqgkskrekkdrvftdktsatvicrknasisvr |
| | | aqdryyssswsewasvpcsggggsggggsggggsrvipvsgparclsqsrnllkttddmvktareklkhysctaedid |
| | | heditrdqtstlktclplelhknesclatretssttrgsclppqktslmmtlclgsiyedlkmyqtefqainaalqnhnhqqiil |
| | | dkgmlvaidelmqslnhngetlrqkppvgeadpyrvkmklcillhafstrvvtinrvmgylssasggpALFKSSF |
| | | PpgsggggsggggsggggsggggsggggsggggsQSVLTQPPSVSGAPGQRVTISCSGSRSNI |
| | | GeeTVKWYQQLPGTAPKLLIYYNDQRPSGVPDRFSGSKSGTSASLAITGLQAED |
| | | EADYYCQSYDRYTHPALLFGTGTKVTVLggggSggggSggggSQVQLVESGGGVVQ |
| | | PGRSLRLSCAASGFTFSSYGMHWVRQAPGKGLEWVAFIRYDGSNKYYADSV |
| | | KGRFTISRDNSKNTLYLQMNSLRAEDTAVYYCKTHGSHDNWGQGTMVTVSS |
| | | ** |
| 489 | WW0695 | EVQLVESGGGLVQPGNSLRLSCAASGFTFSKFGMSWVRQAPGKGLEWVSSIS |
| | | GSGRDTLYAESVKGRFTISRDNAKTTLYLQMNSLRPEDTAVYYCTIGGSLSVS |
| | | SQGTLVTVSSsggpALFKSSFPpgsiwelkkdvyvveldwypdapgemvvltcdtpeedgitwtldqss |
| | | evlgsgktltiqvkefgdagqytchkggevlshsllllhkkedgiwstdilkdqkepknktflrceaknysgrftcwwltti |
| | | stdltfsvkssrgssdpqgvtcgaatlsaervrgdnkeyeysvecqedsacpaaeeslpievmvdavhklkyenytssff |
| | | irdiikpdppknlqlkplknsrqvevsweypdtwstphsyfsltfcvqvqgkskrekkdrvftdktsatvicrknasisvr |
| | | aqdryyssswsewasvpcsggggsggggsggggsrnlpvatpdpgmfpclhhsqnllravsnmlqkarqtlefypct |
| | | seeidheditkdktstveaclpleltknesclnsretsfitngsclasrktsfmmalclssiyedlkmyqvefktmnakllm |
| | | dpkrqifldqnmlavidelmqalnfnsetvpqkssleepdfyktkiklcillhafriravtidrvmsylnassggpALFK |
| | | SSFPpgsggggsggggsggggsggggsggggsggggsQSVLTQPPSVSGAPGQRVTISCSGSRS |
| | | NIGeeTVKWYQQLPGTAPKLLIYYNDQRPSGVPDRFSGSKSGTSASLAITGLQA |
| | | EDEADYYCQSYDRYTHPALLFGTGTKVTVLggggsggggsggggsQVQLVESGGGV |
| | | VQPGRSLRLSCAASGFTFSSYGMHWVRQAPGKGLEWVAFIRYDGSNKYYAD |
| | | SVKGRFTISRDNSKNTLYLQMNSLRAEDTAVYYCKTHGSHDNWGQGTMVTV |
| | | SS** |
| 490 | WW0696 | EVQLVESGGGLVQPGNSLRLSCAASGFTFSKFGMSWVRQAPGKGLEWVSSIS |
| | | GSGRDTLYAESVKGRFTISRDNAKTTLYLQMNSLRPEDTAVYYCTIGGSLSVS |
| | | SQGTLVTVSSsggpALFKSSFPpgsiwelkkdvyvveldwypdapgemvvltcdtpeedgitwtldqss |
| | | evlgsgktltiqvkefgdagqytchkggevlshsllllhkkedgiwstdilkdqkepknktflrceaknysgrftcwwltti |
| | | stdltfsvkssrgssdpqgvtcgaatlsaervrgdnkeyeysvecqedsacpaaeeslpievmvdavhklkyenytssff |
| | | irdiikpdppknlqlkplknsrqvevsweypdtwstphsyfsltfcvqvqgkskrekkdrvftdktsatvicrknasisvr |
| | | aqdryyssswsewasvpcsggggsggggsggggsrvipvsgparclsqsrnllkttddmvktareklkhysctaedid |
| | | heditrdqtstlktclplelhknesclatretssttrgsclppqktslmmtlclgsiyedlkmyqtefqainaalqnlmhqqiil |
| | | dkgmlvaidelmqslnhngetlrqkppvgeadpyrvkmklcillhafstrvvtinrvmgylssasggpALFKSSF |
| | | PpgsggggsggggsggggsggggsggggsggggsQSVLTQPPSVSGAPGQRVTISCSGSRSNI |
| | | GSeTVKWYQQLPGTAPKLLIYYNDQRPSGVPDRFSGSKSGTSASLAITGLQAE |
| | | DEADYYCQSYDRYTHPALLFGTGTKVTVLggggsggggsggggsQVQLVESGGGVV |
| | | QPGRSLRLSCAASGFTFSSYGMHWVRQAPGKGLEWVAFIRYeGSNKYYADSV |
| | | KGRFTISRDNSKNTLYLQMNSLRAEDTAVYYCKTHGSHDNWGQGTMVTVSS |
| | | ** |
| 491 | WW0697 | EVQLVESGGGLVQPGNSLRLSCAASGFTFSKFGMSWVRQAPGKGLEWVSSIS |
| | | GSGRDTLYAESVKGRFTISRDNAKTTLYLQMNSLRPEDTAVYYCTIGGSLSVS |
| | | SQGTLVTVSSsggpALFKSSFPpgsiwelkkdvyvveldwypdapgemvvltcdtpeedgitwtldqss |
| | | evlgsgktltiqvkefgdagqytchkggevlshsllllhkkedgiwstdilkdqkepknktflrceaknysgrftcwwltti |
| | | stdltfsvkssrgssdpqgvtcgaatlsaervrgdnkeyeysvecqedsacpaaeeslpievmvdavhklkyenytssff |
| | | irdiikpdppknlqlkplknsrqvevsweypdtwstphsyfsltfcvqvqgkskrekkdrvftdktsatvicrknasisvr |
| | | aqdryyssswsewasvpcsggggsggggsggggsrnlpvatpdpgmfpclhhsqnllravsnmlqkarqtlefypct |
| | | seeidheditkdktstveaclpleltknesclnsretsfitngsclasrktsfmmalclssiyedlkmyqvefktmnakllm |
| | | dpkrqifldqnmlavidelmqalnfnsetvpqkssleepdfyktkiklcillhafriravtidrvmsylnassggpALFK |
| | | SSFPpgsggggsggggsggggsggggsggggsggggsQSVLTQPPSVSGAPGQRVTISCSGSRS |
| | | NIGSeTVKWYQQLPGTAPKLLIYYNDQRPSGVPDRFSGSKSGTSASLAITGLQA |
| | | EDEADYYCQSYDRYTHPALLFGTGTKVTVLggggsggggsggggsQVQLVESGGGV |
| | | VQPGRSLRLSCAASGFTFSSYGMHWVRQAPGKGLEWVAFIRYeGSNKYYADS |
| | | VKGRFTISRDNSKNTLYLQMNSLRAEDTAVYYCKTHGSHDNWGQGTMVTVS |
| | | S** |
| 492 | WW0698 | EVQLVESGGGLVQPGNSLRLSCAASGFTFSKFGMSWVRQAPGKGLEWVSSIS |
| | | GSGRDTLYAESVKGRFTISRDNAKTTLYLQMNSLRPEDTAVYYCTIGGSLSVS |
| | | SQGTLVTVSSsggpGPAGLYAQpgsiwelkkdvyvveldwypdapgemvvltcdtpeedgitwtldqs |
| | | sevlgsgktltiqvkefgdagqytchkggevlshsllllhkkedgiwstdilkdqkepknktflrceaknysgrftcwwltt |
| | | istdltfsvkssrgssdpqgvtcgaatlsaervrgdnkeyeysvecqedsacpaaeeslpievmvdavhklkyenytssf |
| | | firdiikpdppknlqlkplknsrqvevsweypdtwstphsyfsltfcvqvqgkskrekkdrvftdktsatvicrknasisv |
| | | raqdryyssswsewasvpcsggggsggggsggggsrvipvsgparclsqsrnllkttddmvktareklkhysctaedi |
| | | dheditrdqtstlktclplelhknesclatretssttrgsclppqktslmmtlclgsiyedlkmyqtefqainaalqnlmhqqi |
| | | ildkgmlvaidelmqslnhngetlrqkppvgeadpyrvkmklcillhafstrvvtinrvmgylssasggpGPAGLY |
| | | AQpgsggggsggggsggggsggggsggggsggggsQSVLTQPPSVSGAPGQRVTISCSGSRSN |
| | | IGSNTVKWYQQLPGTAPKLLIYYNDQRPSGVPDRFSGSKSGTSASLAITGLQAE |
| | | DEADYYCQSYDRYTHPALLFGTGTKVTVLgqpkaapsvtlfppsseelqankatlvclisdfypg |
| | | avtvawkadsspvkagvetttpskqsnnkyaassylsltpeqwkshrsyscqvthegstvektvaptecs** |
| 493 | WW0699 | EVQLVESGGGLVQPGNSLRLSCAASGFTFSKFGMSWVRQAPGKGLEWVSSIS |
| | | GSGRDTLYAESVKGRFTISRDNAKTTLYLQMNSLRPEDTAVYYCTIGGSLSVS |
| | | SQGTLVTVSSsggpGPAGLYAQpgsiwelkkdvyvveldwypdapgemvvltcdtpeedgitwtldqs |
| | | sevlgsgktltiqvkefgdagqytchkggevlshsllllhkkedgiwstdilkdqkepknktflrceaknysgrftcwwltt |
| | | istdltfsvkssrgssdpqgvtcgaatlsaervrgdnkeyeysvecqedsacpaaeeslpievmvdavhklkyenytssf |
| | | firdiikpdppknlqlkplknsrqvevsweypdtwstphsyfsltfcvqvqgkskrekkdrvftdktsatvicrknasisv |
| | | raqdryyssswsewasvpcsggggsggggsggggsrnlpvatpdpgmfpclhhsqnllravsnmlqkarqtlelypc |
| | | tseeidheditkdktstveaclpleltknesclnsretsfitngsclasrktsfmmalclssiyedlkmyqvefktmnakllm |
| | | dpkrqifldqnmlavidelmqalnfnsetvpqkssleepdfyktkiklcillhafriravtidrvmsylnassggpGPA |
| | | GLYAQpgsggggsggggsggggsggggsggggsggggsQSVLTQPPSVSGAPGQRVTISCSG |
| | | SRSNIGSNTVKWYQQLPGTAPKLLIYYNDQRPSGVPDRFSGSKSGTSASLAITG |
| | | LQAEDEADYYCQSYDRYTHPALLFGTGTKVTVLgqpkaapsvtlfppsseelqankatlvcli |
| | | sdfypgavtvawkadsspvkagvetttpskqsnnkyaassylsltpeqwkshrsyscqvthegstvektvaptecs** |
| 494 | WW0700 | EVQLVESGGGLVQPGNSLRLSCAASGFTFSKFGMSWVRQAPGKGLEWVSSIS |
| | | GSGRDTLYAESVKGRFTISRDNAKTTLYLQMNSLRPEDTAVYYCTIGGSLSVS |
| | | SQGTLVTVSSsggpGPAGLYAQpgsiwelkkdvyvveldwypdapgemvvltcdtpeedgitwtldqs |
| | | sevlgsgktltiqvkefgdagqytchkggevlshsllllhkkedgiwstdilkdqkepknktflrceaknysgrftcwwltt |
| | | istdltfsvkssrgssdpqgvtcgaatlsaervrgdnkeyeysvecqedsacpaaeeslpievmvdavhklkyenytssf |
| | | firdiikpdppknlqlkplknsrqvevsweypdtwstphsyfsltfcvqvqgkskrekkdrvftdktsatvicrknasisv |
| | | raqdryyssswsewasvpesggggsggggsggggsrvipvsgparclsqsrllkttddmvktareklkhysctaedi |
| | | dheditrdqtstlktclplelhknesclatretssttrgsclppqktslmmtlclgsiyedlkmyqtefqainaalqnhnhqqi |
| | | ildkgmlvaidelmqslnhngetlrqkppvgeadpyrvkmklcillhafstrvvtinrvmgylssasggpGPAGLY |
| | | AQpgsggggsggggsggggsggggsggggsggggsQSVLTQPPSVSGAPGQRVTISCSGSRSN |
| | | IGSeTVKWYQQLPGTAPKLLIYYNDQRPSGVPDRFSGSKSGTSASLAITGLQAE |
| | | DEADYYCQSYDRYTHPALLFGTGTKVTVLgqpkaapsvtlfppsseelqankatlvclisdfypg |
| | | avtvawkadsspvkagvetttpskqsnnkyaassylsltpeqwkshrsyscqvthegstvektvaptecs** |
| 495 | WW0701 | EVQLVESGGGLVQPGNSLRLSCAASGFTFSKFGMSWVRQAPGKGLEWVSSIS |
| | | GSGRDTLYAESVKGRFTISRDNAKTTLYLQMNSLRPEDTAVYYCTIGGSLSVS |
| | | SQGTLVTVSSsggpGPAGLYAQpgsiwelkkdvyvveldwypdapgemvvltcdtpeedgitwtldqs |
| | | sevlgsgktltiqvkefgdagqytchkggevlshsllllhkkedgiwstdilkdqkepknktflrceaknysgrftcwwltt |
| | | istdltfsvkssrgssdpqgvtcgaatlsaervrgdnkeyeysvecqedsacpaaeeslpievmvdavhklkyenytssf |
| | | firdiikpdppknlqlkplknsrqvevsweypdtwstphsyfsltfcvqvqgkskrekkdrvftdktsatvicrknasisv |
| | | raqdryyssswsewasvpcsggggsggggsggggsrnlpvatpdpgmfpclhhsqnllravsnmlqkarqtlefypc |
| | | tseeidheditkdktstveaclpleltknesclnsretsfitngsclasrktsfmmalclssiyedlkmyqvefktmnakllm |
| | | dpkrqifldqnmlavidelmqalnfnsetvpqkssleepdfyktkiklcillhafriravtidrvmsylnassggpGPA |
| | | GLYAQpgsggggsggggsggggsggggsggggsggggsQSVLTQPPSVSGAPGQRVTISCSG |
| | | SRSNIGSeTVKWYQQLPGTAPKLLIYYNDQRPSGVPDRFSGSKSGTSASLAITG |
| | | LQAEDEADYYCQSYDRYTHPALLFGTGTKVTVLgqpkaapsvtlfppsseelqankatlvcli |
| | | sdfypgavtvawkadsspvkagvetttpskqsnnkyaassylsltpeqwkshrsyscqvthegstvektvaptecs** |
| 496 | WW0702 | EVQLVESGGGLVQPGNSLRLSCAASGFTFSKFGMSWVRQAPGKGLEWVSSIS |
| | | GSGRDTLYAESVKGRFTISRDNAKTTLYLQMNSLRPEDTAVYYCTIGGSLSVS |
| | | SQGTLVTVSSsggpGPAGLYAQpgsiwelkkdvyweldwypdapgemvvltcdtpeedgitwtldqs |
| | | sevlgsgktltiqvkefgdagqytchkggevlshsllllhkkedgiwstdilkdqkepknktflrceaknysgrftcwwltt |
| | | istdltfsvkssrgssdpqgvtcgaatlsaervrgdnkeyeysvecqedsacpaaeeslpievmvdavhklkyenytssf |
| | | firdiikpdppknlqlkplknsrqvevsweypdtwstphsyfsltfcvqvqgkskrekkdrvftdktsatvicrknasisv |
| | | raqdryyssswsewasvpcsggggsggggsggggsrvipvsgparclsqsrnllkttddmvktareklkhysctaedi |
| | | dheditrdqtstlktclplelhknesclatretssttrgsclppqktslmmtlclgsiyedlkmyqtefqainaalqnlmhqqi |
| | | ildkgmlvaidelmqslnhngetlrqkppvgeadpyrvkmklcillhafstrvvtinrvmgylssasggpGPAGLY |
| | | AQpgsggggsggggsggggsggggsggggsggggsQSVLTQPPSVSGAPGQRVTISCSGSRSN |
| | | IGdNTVKWYQQLPGTAPKLLIYYNDQRPSGVPDRFSGSKSGTSASLAITGLQAE |
| | | DEADYYCQSYDRYTHPALLFGTGTKVTVLgqpkaapsvtlfppsseelqankatlvclisdfypg |
| | | avtvawkadsspvkagvetttpskqsnnkyaassylsltpeqwkshrsyscqvthegstvektvaptecs** |
| 497 | WW0703 | EVQLVESGGGLVQPGNSLRLSCAASGFTFSKFGMSWVRQAPGKGLEWVSSIS |
| | | GSGRDTLYAESVKGRFTISRDNAKTTLYLQMNSLRPEDTAVYYCTIGGSLSVS |
| | | SQGTLVTVSSsggpGPAGLYAQpgsiwelkkdvyweldwypdapgemvvltcdtpeedgitwtldqs |
| | | sevlgsgktltiqvkefgdagqytchkggevlshsllllhkkedgiwstdilkdqkepknktflrceaknysgrftcwwltt |
| | | istdltfsvkssrgssdpqgvtcgaatlsaervrgdnkeyeysvecqedsacpaaeeslpievmvdavhklkyenytssf |
| | | firdiikpdppknlqlkplknsrqvevsweypdtwstphsyfsltfcvqvqgkskrekkdrvftdktsatvicrknasisv |
| | | raqdryyssswsewasvpcsggggsggggsggggsrnlpvatpdpgmfpclhhsqnllravsnmlqkarqtlefypc |
| | | tseeidheditkdktstveaclpleltknesclnsretsfitngsclasrktsfmmalclssiyedlkmyqvefktmnakllm |
| | | dpkrqifldqnmlavidelmqalnfnsetvpqkssleepdfyktkiklcillhafriravtidrvmsylnassggpGPA |
| | | GLYAQpgsggggsggggsggggsggggsggggsggggsQSVLTQPPSVSGAPGQRVTISCSG |
| | | SRSNIGdNTVKWYQQLPGTAPKLLIYYNDQRPSGVPDRFSGSKSGTSASLAITG |
| | | LQAEDEADYYCQSYDRYTHPALLFGTGTKVTVLgqpkaapsvtlfppsseelqankatlvcli |
| | | sdfypgavtvawkadsspvkagvetttpskqsnnkyaassylsltpeqwkshrsyscqvthegstvektvaptecs** |
| 498 | WW0704 | EVQLVESGGGLVQPGNSLRLSCAASGFTFSKFGMSWVRQAPGKGLEWVSSIS |
| | | GSGRDTLYAESVKGRFTISRDNAKTTLYLQMNSLRPEDTAVYYCTIGGSLSVS |
| | | SQGTLVTVSSsggpGPAGLYAQpgsiwelkkdvyvveldwypdapgemvvltcdtpeedgitwtldqs |
| | | sevlgsgktltiqvkefgdagqytchkggevlshsllllhkkedgiwstdilkdqkepknktflrceaknysgrftcwwltt |
| | | istdltfsvkssrgssdpqgvtcgaatlsaervrgdnkeyeysvecqedsacpaaeeslpievmvdavhklkyenytssf |
| | | firdiikpdppknlqlkplknsrqvevsweypdtwstphsyfsltfcvqvqgkskrekkdrvftdktsatvicrknasisv |
| | | raqdryyssswsewasvpcsggggsggggsggggsrvipvsgparclsqsrnllkttddmvktareklkhysctaedi |
| | | dheditrdqtstlktclplelhknesclatretssttrgsclppqktslmmtlclgsiyedlkmyqtefqainaalqnlmhqqi |
| | | ildkgmlvaidelmqslnhngetlrqkppvgeadpyrvkmklcillhafstrvvtinrvmgylssasggpGPAGLY |
| | | AQpgsggggsggggsggggsggggsggggsggggsQSVLTQPPSVSGAPGQRVTISCSGSRSN |
| | | IGdeTVKWYQQLPGTAPKLLIYYNDQRPSGVPDRFSGSKSGTSASLAITGLQAE |
| | | DEADYYCQSYDRYTHPALLFGTGTKVTVLgqpkaapsvtlfppsseelqankatlvclisdfypg |
| | | avtvawkadsspvkagvetttpskqsnnkyaassylsltpeqwkshrsyscqvthegstvektvaptecs** |
| 499 | WW0705 | EVQLVESGGGLVQPGNSLRLSCAASGFTFSKFGMSWVRQAPGKGLEWVSSIS |
| | | GSGRDTLYAESVKGRFTISRDNAKTTLYLQMNSLRPEDTAVYYCTIGGSLSVS |
| | | SQGTLVTVSSsggpGPAGLYAQpgsiwelkkdvyvveldwypdapgemvvltcdtpeedgitwtldqs |
| | | sevlgsgktltiqvkefgdagqytehkggevlshsllllhkkedgiwstdilkdqkepknktflrceaknysgrftcwwltt |
| | | istdltfsvkssrgssdpqgvtcgaatlsaervrgdnkeyeysvecqedsacpaaeeslpievmvdavhklkyenytssf |
| | | firdiikpdppknlqlkplknsrqvevsweypdtwstphsyfsltfcvqvqgkskrekkdrvftdktsatvicrknasisv |
| | | raqdryyssswsewasvpcsggggsggggsggggsrnlpvatpdpgmfpclhhsqnllravsnmlqkarqtlefypc |
| | | tseeidheditkdktstveaclpleltknesclnsretsfitngsclasrktsfmmalclssiyedlkmyqvefktmnakllm |
| | | dpkrqifldqnmlavidelmqalnfnsetvpqkssleepdfyktkiklcillhafriravtidrvmsylnassggpGPA |
| | | GLYAQpgsggggsggggsggggsggggsggggsggggsQSVLTQPPSVSGAPGQRVTISCSG |
| | | SRSNIGdeTVKWYQQLPGTAPKLLIYYNDQRPSGVPDRFSGSKSGTSASLAITG |
| | | LQAEDEADYYCQSYDRYTHPALLFGTGTKVTVLgqpkaapsvtlfppsseelqankatlvcli |
| | | sdfypgavtvawkadsspvkagvetttpskqsnnkyaassylsltpeqwkshrsyscqvthegstvektvaptecs** |
| 500 | WW0706 | EVQLVESGGGLVQPGNSLRLSCAASGFTFSKFGMSWVRQAPGKGLEWVSSIS |
| | | GSGRDTLYAESVKGRFTISRDNAKTTLYLQMNSLRPEDTAVYYCTIGGSLSVS |
| | | SQGTLVTVSSsggpGPAGLYAQpgsiwelkkdvyvveldwypdapgemvvltcdtpeedgitwtldqs |
| | | sevlgsgktltiqvkefgdagqytchkggevlshsllllhkkedgiwstdilkdqkepknktflrceaknysgrftcwwltt |
| | | istdltfsvkssrgssdpqgvtcgaatlsaervrgdnkeyeysvecqedsacpaaeeslpievmvdavhklkyenytssf |
| | | firdiikpdppknlqlkplknsrqvevsweypdtwstphsyfsltfcvqvqgkskrekkdrvftdktsatvicrknasisv |
| | | raqdryyssswsewasvpcsggggsggggsggggsrvipvsgparclsqsrnllkttddmvktareklkhysctaedi |
| | | dheditrdqtstlktclplelhknesclatretssttrgsclppqktslmmtlclgsiyedlkmyqtefqainaalqnlmhqqi |
| | | ildkgmlvaidelmqslnhngetlrqkppvgeadpyrvkmklcillhafstrvvtinrvmgylssasggpGPAGLY |
| | | AQpgsggggsggggsggggsggggsggggsggggsQSVLTQPPSVSGAPGQRVTISCSGSeSN |
| | | IGSNdVKWYQQLPGTAPKLLIYYNDQRPSGVPDRFSGSKSGTSASLAITGLQAE |
| | | DEADYYCQSYDRYTHPALLFGTGTKVTVLgqpkaapsvtlfppsseelqankatlvclisdfypg |
| | | avtvawkadsspvkagvetttpskqsnnkyaassylsltpeqwkshrsyscqvthegstvektvaptecs** |
| 501 | WW0707 | EVQLVESGGGLVQPGNSLRLSCAASGFTFSKFGMSWVRQAPGKGLEWVSSIS |
| | | GSGRDTLYAESVKGRFTISRDNAKTTLYLQMNSLRPEDTAVYYCTIGGSLSVS |
| | | SQGTLVTVSSsggpGPAGLYAQpgsiwelkkdvyvveldwypdapgemvvltcdtpeedgitwtldqs |
| | | sevlgsgktltiqvkefgdagqytchkggevlshsllllhkkedgiwstdilkdqkepknktflrceaknysgrftcwwltt |
| | | istdltfsvkssrgssdpqgvtcgaatlsaervrgdnkeyeysvecqedsacpaaeeslpievmvdavhklkyenytssf |
| | | firdiikpdppknlqlkplknsrqvevsweypdtwstphsyfsltfcvqvqgkskrekkdrvftdktsatvicrknasisv |
| | | raqdryyssswsewasvpcsggggsggggsggggsrnlpvatpdpgmfpclhhsqnllravsnmlqkarqtlelypc |
| | | tseeidheditkdktstveaclpleltknesclnsretsfitngsclasrktsfmmalclssiyedlkmyqvefktmnakllm |
| | | dpkrqifldqnmlavidelmqalnfnsetvpqkssleepdfyktkiklcillhafriravtidrvmsylnassggpGPA |
| | | GLYAQpgsggggsggggsggggsggggsggggsggggsQSVLTQPPSVSGAPGQRVTISCSG |
| | | SeSNIGSNdVKWYQQLPGTAPKLLIYYNDQRPSGVPDRFSGSKSGTSASLAITG |
| | | LQAEDEADYYCQSYDRYTHPALLFGTGTKVTVLgqpkaapsvtlfppsseelqankatlvcli |
| | | sdfypgavtvawkadsspvkagvetttpskqsnnkyaassylsltpeqwkshrsyscqvthegstvektvaptecs** |
| 502 | WW0708 | EVQLVESGGGLVQPGNSLRLSCAASGFTFSKFGMSWVRQAPGKGLEWVSSIS |
| | | GSGRDTLYAESVKGRFTISRDNAKTTLYLQMNSLRPEDTAVYYCTIGGSLSVS |
| | | SQGTLVTVSSsggpGPAGLYAQpgsiwelkkdvyvveldwypdapgemvvltcdtpeedgitwtldqs |
| | | sevlgsgktltiqvkefgdagqytchkggevlshsllllhkkedgiwstdilkdqkepknktflrceaknysgrftcwwltt |
| | | istdltfsvkssrgssdpqgvtcgaatlsaervrgdnkeyeysvecqedsacpaaeeslpievmvdavhklkyenytssf |
| | | firdiikpdppknlqlkplknsrqvevsweypdtwstphsyfsltfcvqvqgkskrekkdrvftdktsatvicrknasisv |
| | | raqdryyssswsewasvpcsggggsggggsggggsrvipvsgparclsqsrnllkttddmvktareklkhysctaedi |
| | | dheditrdqtstlktclplelhknesclatretssttrgsclppqktslmmtlclgsiyedlkmyqtefqainaalqnlmhqqi |
| | | ildkgmlvaidelmqslnhngetlrqkppvgeadpyrvkmklcillhafstrvvtinrvmgylssasggpGPAGLY |
| | | AQpgsggggsggggsggggsggggsggggsggggsQSVLTQPPSVSGAPGQRVTISCSGSRSN |
| | | IGeNTVKWYQQLPGTAPKLLIYYNDQRPSGVPDRFSGSKSGTSASLAITGLQAE |
| | | DEADYYCQSYDRYTHPALLFGTGTKVTVLgqpkaapsvtlfppsseelqankatlvclisdfypg |
| | | avtvawkadsspvkagvetttpskqsnnkyaassylsltpeqwkshrsyscqvthegstvektvaptecs** |
| 503 | WW0709 | EVQLVESGGGLVQPGNSLRLSCAASGFTFSKFGMSWVRQAPGKGLEWVSSIS |
| | | GSGRDTLYAESVKGRFTISRDNAKTTLYLQMNSLRPEDTAVYYCTIGGSLSVS |
| | | SQGTLVTVSSsggpGPAGLYAQpgsiwelkkdvyvveldwypdapgemvvltcdtpeedgitwtldqs |
| | | sevlgsgktltiqvkefgdagqytchkggevlshsllllhkkedgiwstdilkdqkepknktflrceaknysgrftcwwltt |
| | | istdltfsvkssrgssdpqgvtcgaatlsaervrgdnkeyeysvecqedsacpaaeeslpievmvdavhklkyenytssf |
| | | firdiikpdppknlqlkplknsrqvevsweypdtwstphsyfsltfcvqvqgkskrekkdrvftdktsatvicrknasisv |
| | | raqdryyssswsewasvpcsggggsggggsggggsrnlpvatpdpgmfpclhhsqnllravsnmlqkarqtlefypc |
| | | tseeidheditkdktstveaclpleltknesclnsretsfitngsclasrktsfmmalclssiyedlkmyqvefktmnakllm |
| | | dpkrqifldqnmlavidelmqalnfnsetvpqkssleepdfyktkiklcillhafriravtidrvmsylnassggpGPA |
| | | GLYAQpgsggggsggggsggggsggggsggggsggggsQSVLTQPPSVSGAPGQRVTISCSG |
| | | SRSNIGeNTVKWYQQLPGTAPKLLIYYNDQRPSGVPDRFSGSKSGTSASLAITG |
| | | LQAEDEADYYCQSYDRYTHPALLFGTGTKVTVLgqpkaapsvtlfppsseelqankatlvcli |
| | | sdfypgavtvawkadsspvkagvetttpskqsnnkyaassylsltpeqwkshrsyscqvthegstvektvaptecs** |
| 504 | WW0710 | EVQLVESGGGLVQPGNSLRLSCAASGFTFSKFGMSWVRQAPGKGLEWVSSIS |
| | | GSGRDTLYAESVKGRFTISRDNAKTTLYLQMNSLRPEDTAVYYCTIGGSLSVS |
| | | SQGTLVTVSSsggpGPAGLYAQpgsiwelkkdvyvveldwypdapgemvvltcdtpeedgitwtldqs |
| | | sevlgsgktltiqvkefgdagqytchkggevlshsllllhkkedgiwstdilkdqkepknktflrceaknysgrftcwwltt |
| | | istdltfsvkssrgssdpqgvtcgaatlsaervrgdnkeyeysvecqedsacpaaeeslpievmvdavhklkyenytssf |
| | | firdiikpdppknlqlkplknsrqvevsweypdtwstphsyfsltfcvqvqgkskrekkdrvftdktsatvicrknasisv |
| | | raqdryyssswsewasvpcsggggsggggsggggsrvipvsgparclsqsrnllkttddmvktareklkhysctaedi |
| | | dheditrdqtstlktclplelhknesclatretssttrgsclppqktslmmtlclgsiyedlkmyqtefqainaalqnlmhqqi |
| | | ildkgmlvaidelmqslnhngetlrqkppvgeadpyrvkmklcillhafstrvvtinrvmgylssasggpGPAGLY |
| | | AQpgsggggsggggsggggsggggsggggsggggsQSVLTQPPSVSGAPGQRVTISCSGSRSN |
| | | IGeeTVKWYQQLPGTAPKLLIYYNDQRPSGVPDRFSGSKSGTSASLAITGLQAE |
| | | DEADYYCQSYDRYTHPALLFGTGTKVTVLgqpkaapsvtlfppsseelqankatlvclisdfypg |
| | | avtvawkadsspvkagvetttpskqsnnkyaassylsltpeqwkshrsyscqvthegstvektvaptecs** |
| 505 | WW0711 | EVQLVESGGGLVQPGNSLRLSCAASGFTFSKFGMSWVRQAPGKGLEWVSSIS |
| | | GSGRDTLYAESVKGRFTISRDNAKTTLYLQMNSLRPEDTAVYYCTIGGSLSVS |
| | | SQGTLVTVSSsggpGPAGLYAQpgsiwelkkdvyvveldwypdapgemvvltcdtpeedgitwtldqs |
| | | sevlgsgktltiqvkefgdagqytchkggevlshsllllhkkedgiwstdilkdqkepknktflrceaknysgrftcwwltt |
| | | istdltfsvkssrgssdpqgvtcgaatlsaervrgdnkeyeysvecqedsacpaaeeslpievmvdavhklkyenytssf |
| | | firdiikpdppknlqlkplknsrqvevsweypdtwstphsyfsltfcvqvqgkskrekkdrvftdktsatvicrknasisv |
| | | raqdryyssswsewasvpcsggggsggggsggggsrnlpvatpdpgmfpclhhsqnllravsnmlqkarqtlefypc |
| | | tseeidheditkdktstveaclpleltknesclnsretsfitngsclasrktsfmmalclssiyedlkmyqvefktmnakllm |
| | | dpkrqifldqnmlavidelmqalnfnsetvpqkssleepdfyktkiklcillhafriravtidrvmsylnassggpGPA |
| | | GLYAQpgsggggsggggsggggsggggsggggsggggsQSVLTQPPSVSGAPGQRVTISCSG |
| | | SRSNIGeeTVKWYQQLPGTAPKLLIYYNDQRPSGVPDRFSGSKSGTSASLAITGL |
| | | QAEDEADYYCQSYDRYTHPALLFGTGTKVTVLgqpkaapsvtlfppsseelqankatlvclis |
| | | dfypgavtvawkadsspvkagvetttpskqsimkyaassylsltpeqwkshrsyscqvthegstvektvaptecs** |
| 506 | WW0712 | EVQLVESGGGLVQPGNSLRLSCAASGFTFSKFGMSWVRQAPGKGLEWVSSIS |
| | | GSGRDTLYAESVKGRFTISRDNAKTTLYLQMNSLRPEDTAVYYCTIGGSLSVS |
| | | SQGTLVTVSSsggpALFKSSFPpgsiwelkkdvyvveldwypdapgemvvltcdtpeedgitwtldqss |
| | | evlgsgktltiqvkefgdagqytchkggevlshsllllhkkedgiwstdilkdqkepknktflrceaknysgrftcwwltti |
| | | stdltfsvkssrgssdpqgvtcgaatlsaervrgdnkeyeysvecqedsacpaaeeslpievmvdavhklkyenytssff |
| | | irdiikpdppknlqlkplknsrqvevsweypdtwstphsyfsltfcvqvqgkskrekkdrvftdktsatvicrknasisvr |
| | | aqdryyssswsewasvpcsggggsggggsggggsrvipvsgparclsqsrnllkttddmvktareklkhysctaedid |
| | | heditrdqtstlktclplelhknesclatretssttrgsclppqktslmmtlclgsiyedlkmyqtefqainaalqnlmhqqiil |
| | | dkgmlvaidelmqslnhngetlrqkppvgeadpyrvkmklcillhafstrvvtinrvmgylssasggpALFKSSF |
| | | PpgsggggsggggsggggsggggsggggsggggsQSVLTQPPSVSGAPGQRVTISCSGSRSNI |
| | | GSNTVKWYQQLPGTAPKLLIYYNDQRPSGVPDRFSGSKSGTSASLAITGLQAE |
| | | DEADYYCQSYDRYTHPALLFGTGTKVTVLgqpkaapsvtlfppsseelqankatlvclisdfypg |
| | | avtvawkadsspvkagvetttpskqsnnkyaassylsltpeqwkshrsyscqvthegstvektvaptecs** |
| 507 | WW0713 | EVQLVESGGGLVQPGNSLRLSCAASGFTFSKFGMSWVRQAPGKGLEWVSSIS |
| | | GSGRDTLYAESVKGRFTISRDNAKTTLYLQMNSLRPEDTAVYYCTIGGSLSVS |
| | | SQGTLVTVSSsggpALFKSSFPpgsiwelkkdvyvveldwypdapgemvvltcdtpeedgitwtldqss |
| | | evlgsgktltiqvkefgdagqytchkggevlshsllllhkkedgiwstdilkdqkepknktflrceaknysgrftcwwltti |
| | | stdltfsvkssrgssdpqgvtcgaatlsaervrgdnkeyeysvecqedsacpaaeeslpievmvdavhklkyenytssff |
| | | irdiikpdppknlqlkplknsrqvevsweypdtwstphsyfsltfcvqvqgkskrekkdrvftdktsatvicrknasisvr |
| | | aqdryyssswsewasvpcsggggsggggsggggsrnlpvatpdpgmfpclhhsqnllravsnmlqkarqtlefypct |
| | | seeidheditkdktstveaclpleltknesclnsretsfitngsclasrktsfmmalclssiyedlkmyqvefktmnakllm |
| | | dpkrqifldqnmlavidelmqalnfnsetvpqkssleepdfyktkiklcillhafriravtidrvmsylnassggpALFK |
| | | SSFPpgsggggsggggsggggsggggsggggsggggsQSVLTQPPSVSGAPGQRVTISCSGSRS |
| | | NIGSNTVKWYQQLPGTAPKLLIYYNDQRPSGVPDRFSGSKSGTSASLAITGLQ |
| | | AEDEADYYCQSYDRYTHPALLFGTGTKVTVLgqpkaapsvtlfppsseelqankatlvclisdf |
| | | ypgavtvawkadsspvkagvetttpskqsimkyaassylsltpeqwkshrsyscqvthegstvektvaptecs** |
| 508 | WW0714 | EVQLVESGGGLVQPGNSLRLSCAASGFTFSKFGMSWVRQAPGKGLEWVSSIS |
| | | GSGRDTLYAESVKGRFTISRDNAKTTLYLQMNSLRPEDTAVYYCTIGGSLSVS |
| | | SQGTLVTVSSsggpALFKSSFPpgsiwelkkdvyvveldwypdapgemvvltcdtpeedgitwtldqss |
| | | evlgsgktltiqvkefgdagqytchkggevlshsllllhkkedgiwstdilkdqkepknktflrceaknysgrftcwwltti |
| | | stdltfsvkssrgssdpqgvtcgaatlsaervrgdnkeyeysvecqedsacpaaeeslpievmvdavhklkyenytssff |
| | | irdiikpdppknlqlkplknsrqvevsweypdtwstphsyfsltfcvqvqgkskrekkdrvftdktsatvicrknasisvr |
| | | aqdryyssswsewasvpcsggggsggggsggggsrvipvsgparclsqsrnllkttddmvktareklkhysctaedid |
| | | heditrdqtstlktclplelhknesclatretssttrgsclppqktslmmtlclgsiyedlkmyqtefqainaalqnlmhqqiil |
| | | dkgmlvaidelmqslnhngetlrqkppvgeadpyrvkmklcillhafstrvvtinrvmgylssasggpALFKSSF |
| | | PpgsggggsggggsggggsggggsggggsggggsQSVLTQPPSVSGAPGQRVTISCSGSRSNI |
| | | GSeTVKWYQQLPGTAPKLLIYYNDQRPSGVPDRFSGSKSGTSASLAITGLQAE |
| | | DEADYYCQSYDRYTHPALLFGTGTKVTVLgqpkaapsvtlfppsseelqankatlvclisdfypg |
| | | avtvawkadsspvkagvetttpskqsnnkyaassylsltpeqwkshrsyscqvthegstvektvaptecs** |
| 509 | WW0715 | EVQLVESGGGLVQPGNSLRLSCAASGFTFSKFGMSWVRQAPGKGLEWVSSIS |
| | | GSGRDTLYAESVKGRFTISRDNAKTTLYLQMNSLRPEDTAVYYCTIGGSLSVS |
| | | SQGTLVTVSSsggpALFKSSFPpgsiwelkkdvyvveldwypdapgemvvltcdtpeedgitwtldqss |
| | | evlgsgktltiqvkefgdagqytchkggevlshsllllhkkedgiwstdilkdqkepknktflrceaknysgrftcwwltti |
| | | stdltfsvkssrgssdpqgvtcgaatlsaervrgdnkeyeysvecqedsacpaaeeslpievmvdavhklkyenytssff |
| | | irdiikpdppknlqlkplknsrqvevsweypdtwstphsyfsltfcvqvqgkskrekkdrvftdktsatvicrknasisvr |
| | | aqdryyssswsewasvpcsggggsggggsggggsrnlpvatpdpgmfpclhhsqnllravsnmlqkarqtlefypct |
| | | seeidheditkdktstveaclpleltknesclnsretsfitngsclasrktsfmmalclssiyedlkmyqvefktmnakllm |
| | | dpkrqifldqnmlavidelmqalnfnsetvpqkssleepdfyktkiklcillhafriravtidrvmsylnassggpALFK |
| | | SSFPpgsggggsggggsggggsggggsggggsggggsQSVLTQPPSVSGAPGQRVTISCSGSRS |
| | | NIGSeTVKWYQQLPGTAPKLLIYYNDQRPSGVPDRFSGSKSGTSASLAITGLQA |
| | | EDEADYYCQSYDRYTHPALLFGTGTKVTVLgqpkaapsvtlfppsseelqankatlvclisdlyp |
| | | gavtvawkadsspvkagvetttpskqsnnkyaassylsltpeqwkshrsyscqvthegstvektvaptecs** |
| 510 | WW0716 | EVQLVESGGGLVQPGNSLRLSCAASGFTFSKFGMSWVRQAPGKGLEWVSSIS |
| | | GSGRDTLYAESVKGRFTISRDNAKTTLYLQMNSLRPEDTAVYYCTIGGSLSVS |
| | | SQGTLVTVSSsggpALFKSSFPpgsiwelkkdvyvveldwypdapgemvvltcdtpeedgitwtldqss |
| | | evlgsgktltiqvkefgdagqytchkggevlshsllllhkkedgiwstdilkdqkepknktflrceaknysgrftcwwltti |
| | | stdltfsvkssrgssdpqgvtcgaatlsaervrgdnkeyeysvecqedsacpaaeeslpievmvdavhklkyenytssff |
| | | irdiikpdppknlqlkplknsrqvevsweypdtwstphsyfsltfcvqvqgkskrekkdrvftdktsatvicrknasisvr |
| | | aqdryyssswsewasvpcsggggsggggsggggsrvipvsgparclsqsrnllkttddmvktareklkhysctaedid |
| | | heditrdqtstlktclplelhknesclatretssttrgsclppqktslmmtlclgsiyedlkmyqtefqainaalqnlmhqqiil |
| | | dkgmlvaidelmqslnhngetlrqkppvgeadpyrvkmklcillhafstrvvtinrvmgylssasggpALFKSSF |
| | | PpgsggggsggggsggggsggggsggggsggggsQSVLTQPPSVSGAPGQRVTISCSGSRSNI |
| | | GdNTVKWYQQLPGTAPKLLIYYNDQRPSGVPDRFSGSKSGTSASLAITGLQAE |
| | | DEADYYCQSYDRYTHPALLFGTGTKVTVLgqpkaapsvtlfppsseelqankatlvclisdlypg |
| | | avtvawkadsspvkagvetttpskqsnnkyaassylsltpeqwkshrsyscqvthegstvektvaptecs** |
| 511 | WW0717 | EVQLVESGGGLVQPGNSLRLSCAASGFTFSKFGMSWVRQAPGKGLEWVSSIS |
| | | GSGRDTLYAESVKGRFTISRDNAKTTLYLQMNSLRPEDTAVYYCTIGGSLSVS |
| | | SQGTLVTVSSsggpALFKSSFPpgsiwelkkdvyvveldwypdapgemvvltcdtpeedgitwtldqss |
| | | evlgsgktltiqvkefgdagqytchkggevlshsllllhkkedgiwstdilkdqkepknktflrceaknysgrftcwwltti |
| | | stdltfsvkssrgssdpqgvtcgaatlsaervrgdnkeyeysvecqedsacpaaeeslpievmvdavhklkyenytssff |
| | | irdiikpdppknlqlkplknsrqvevsweypdtwstphsyfsltfcvqvqgkskrekkdrvftdktsatvicrknasisvr |
| | | aqdryyssswsewasvpcsggggsggggsggggsrnlpvatpdpgmfpclhhsqnllravsnmlqkarqtlefypct |
| | | seeidheditkdktstveaclpleltknesclnsretsfitngsclasrktsfmmalclssiyedlkmyqvefktmnakllm |
| | | dpkrqifldqnmlavidelmqalnfnsetvpqkssleepdfyktkiklcillhafriravtidrvmsylnassggpALFK |
| | | SSFPpgsggggsggggsggggsggggsggggsggggsQSVLTQPPSVSGAPGQRVTISCSGSRS |
| | | NIGdNTVKWYQQLPGTAPKLLIYYNDQRPSGVPDRFSGSKSGTSASLAITGLQA |
| | | EDEADYYCQSYDRYTHPALLFGTGTKVTVLgqpkaapsvtlfppsseelqankatlvclisdlyp |
| | | gavtvawkadsspvkagvetttpskqsnnkyaassylsltpeqwkshrsyscqvthegstvektvaptecs** |
| 512 | WW0718 | EVQLVESGGGLVQPGNSLRLSCAASGFTFSKFGMSWVRQAPGKGLEWVSSIS |
| | | GSGRDTLYAESVKGRFTISRDNAKTTLYLQMNSLRPEDTAVYYCTIGGSLSVS |
| | | SQGTLVTVSSsggpALFKSSFPpgsiwelkkdvyweldwypdapgemwltcdtpeedgitwtldqss |
| | | evlgsgktltiqvkefgdagqytchkggevlshsllllhkkedgiwstdilkdqkepknktflrceaknysgrftcwwltti |
| | | stdltfsvkssrgssdpqgvtcgaatlsaervrgdnkeyeysvecqedsacpaaeeslpievmvdavhklkyenytssff |
| | | irdiikpdppknlqlkplknsrqvevsweypdtwstphsyfsltfcvqvqgkskrekkdrvftdktsatvicrknasisvr |
| | | aqdryyssswsewasvpcsggggsggggsggggsrvipvsgparclsqsrnllkttddmvktareklkhysctaedid |
| | | heditrdqtstlktclplelhknesclatretssttrgsclppqktslmmtlclgsiyedlkmyqtefqainaalqnlmhqqiil |
| | | dkgmlvaidelmqslnhngetlrqkppvgeadpyrvkmklcillhafstrvvtinrvmgylssasggpALFKSSF |
| | | PpgsggggsggggsggggsggggsggggsggggsQSVLTQPPSVSGAPGQRVTISCSGSRSNI |
| | | GdeTVKWYQQLPGTAPKLLIYYNDQRPSGVPDRFSGSKSGTSASLAITGLQAED |
| | | EADYYCQSYDRYTHPALLFGTGTKVTVLgqpkaapsvtlfppsseelqankatlvclisdlypga |
| | | vtvawkadsspvkagvetttpskqsimkyaassylsltpeqwkshrsyscqvthegstvektvaptecs** |
| 513 | WW0719 | EVQLVESGGGLVQPGNSLRLSCAASGFTFSKFGMSWVRQAPGKGLEWVSSIS |
| | | GSGRDTLYAESVKGRFTISRDNAKTTLYLQMNSLRPEDTAVYYCTIGGSLSVS |
| | | SQGTLVTVSSsggpALFKSSFPpgsiwelkkdvyvveldwypdapgemvvltcdtpeedgitwtldqss |
| | | evlgsgktltiqvkefgdagqytchkggevlshsllllhkkedgiwstdilkdqkepknktflrceaknysgrftcwwltti |
| | | stdltfsvkssrgssdpqgvtcgaatlsaervrgdnkeyeysvecqedsacpaaeeslpievmvdavhklkyenytssff |
| | | irdiikpdppknlqlkplknsrqvevsweypdtwstphsyfsltfcvqvqgkskrekkdrvftdktsatvicrknasisvr |
| | | aqdryyssswsewasvpcsggggsggggsggggsrnlpvatpdpgmfpclhhsqnllravsnmlqkarqtlefypct |
| | | seeidheditkdktstveaclpleltknesclnsretsfitngsclasrktsfmmalclssiyedlkmyqvefktmnakllm |
| | | dpkrqifldqnmlavidelmqalnfnsetvpqkssleepdfyktkiklcillhafriravtidrvmsylnassggpALFK |
| | | SSFPpgsggggsggggsggggsggggsggggsggggsQSVLTQPPSVSGAPGQRVTISCSGSRS |
| | | NIGdeTVKWYQQLPGTAPKLLIYYNDQRPSGVPDRFSGSKSGTSASLAITGLQA |
| | | EDEADYYCQSYDRYTHPALLFGTGTKVTVLgqpkaapsvtlfppsseelqankatlvclisdfyp |
| | | gavtvawkadsspvkagvetttpskqsnnkyaassylsltpeqwkshrsyscqvthegstvektvaptecs** |
| 514 | WW0720 | EVQLVESGGGLVQPGNSLRLSCAASGFTFSKFGMSWVRQAPGKGLEWVSSIS |
| | | GSGRDTLYAESVKGRFTISRDNAKTTLYLQMNSLRPEDTAVYYCTIGGSLSVS |
| | | SQGTLVTVSSsggpALFKSSFPpgsiwelkkdvyvveldwypdapgemvvltcdtpeedgitwtldqss |
| | | evlgsgktltiqvkefgdagqytchkggevlshsllllhkkedgiwstdilkdqkepknktflrceaknysgrftcwwltti |
| | | stdltfsvkssrgssdpqgvtcgaatlsaervrgdnkeyeysvecqedsacpaaeeslpievmvdavhklkyenytssff |
| | | irdiikpdppknlqlkplknsrqvevsweypdtwstphsyfsltfcvqvqgkskrekkdrvftdktsatvicrknasisvr |
| | | aqdryyssswsewasvpcsggggsggggsggggsrvipvsgparclsqsrnllkttddmvktareklkhysctaedid |
| | | heditrdqtstlktclplelhknesclatretssttrgsclppqktslmmtlclgsiyedlkmyqtefqainaalqnlmhqqiil |
| | | dkgmlvaidelmqslnhngetlrqkppvgeadpyrvkmklcillhafstrvvtinrvmgylssasggpALFKSSF |
| | | PpgsggggsggggsggggsggggsggggsggggsQSVLTQPPSVSGAPGQRVTISCSGSeSNIG |
| | | SNdVKWYQQLPGTAPKLLIYYNDQRPSGVPDRFSGSKSGTSASLAITGLQAED |
| | | EADYYCQSYDRYTHPALLFGTGTKVTVLgqpkaapsvtlfppsseelqaiikatlvclisdlypga |
| | | vtvawkadsspvkagvetttpskqsimkyaassylsltpeqwkshrsyscqvthegstvektvaptecs** |
| 515 | WW0721 | EVQLVESGGGLVQPGNSLRLSCAASGFTFSKFGMSWVRQAPGKGLEWVSSIS |
| | | GSGRDTLYAESVKGRFTISRDNAKTTLYLQMNSLRPEDTAVYYCTIGGSLSVS |
| | | SQGTLVTVSSsggpALFKSSFPpgsiwelkkdvyvveldwypdapgemvvltcdtpeedgitwtldqss |
| | | evlgsgktltiqvkefgdagqytchkggevlshsllllhkkedgiwstdilkdqkepknktflrceaknysgrftcwwltti |
| | | stdltfsvkssrgssdpqgvtcgaatlsaervrgdnkeyeysvecqedsacpaaeeslpievmvdavhklkyenytssff |
| | | irdiikpdppknlqlkplknsrqvevsweypdtwstphsyfsltfcvqvqgkskrekkdrvftdktsatvicrknasisvr |
| | | aqdryyssswsewasvpcsggggsggggsggggsrnlpvatpdpgmfpclhhsqnllravsnmlqkarqtlefypct |
| | | seeidheditkdktstveaclpleltknesclnsretsfitngsclasrktsfmmalclssiyedlkmyqvefktmnakllm |
| | | dpkrqifldqnmlavidelmqalnfnsetvpqkssleepdfyktkiklcillhafriravtidrvmsylnassggpALFK |
| | | SSFPpgsggggsggggsggggsggggsggggsggggsQSVLTQPPSVSGAPGQRVTISCSGSeS |
| | | NIGSNdVKWYQQLPGTAPKLLIYYNDQRPSGVPDRFSGSKSGTSASLAITGLQA |
| | | EDEADYYCQSYDRYTHPALLFGTGTKVTVLgqpkaapsvtlfppsseelqankatlvclisdlyp |
| | | gavtvawkadsspvkagvetttpskqsnnkyaassylsltpeqwkshrsyscqvthegstvektvaptecs** |
| 516 | WW0722 | EVQLVESGGGLVQPGNSLRLSCAASGFTFSKFGMSWVRQAPGKGLEWVSSIS |
| | | GSGRDTLYAESVKGRFTISRDNAKTTLYLQMNSLRPEDTAVYYCTIGGSLSVS |
| | | SQGTLVTVSSSggpALFKSSFPpgsiwelkkdvyvveldwypdapgemvvltcdtpeedgitwtldqss |
| | | evlgsgktltiqvkefgdagqytchkggevlshsllllhkkedgiwstdilkdqkepknktflrceaknysgrftcwwltti |
| | | stdltfsvkssrgssdpqgvtcgaatlsaervrgdnkeyeysvecqedsacpaaeeslpievmvdavhklkyenytssff |
| | | irdiikpdppknlqlkplknsrqvevsweypdtwstphsyfsltfcvqvqgkskrekkdrvftdktsatvicrknasisvr |
| | | aqdryyssswsewasvpcsggggsggggsggggsrvipvsgparclsqsrnllkttddmvktareklkhysctaedid |
| | | heditrdqtstlktclplelhknesclatretssttrgsclppqktslmmtlclgsiyedlkmyqtefqainaalqnlmhqqiil |
| | | dkgmlvaidelmqslnhngetlrqkppvgeadpyrvkmklcillhafstrvvtinrvmgylssasggpALFKSSF |
| | | PpgsggggsggggsggggsggggsggggsggggsQSVLTQPPSVSGAPGQRVTISCSGSRSNI |
| | | GeNTVKWYQQLPGTAPKLLIYYNDQRPSGVPDRFSGSKSGTSASLAITGLQAE |
| | | DEADYYCQSYDRYTHPALLFGTGTKVTVLgqpkaapsvtlfppsseelqankatlvclisdlypg |
| | | avtvawkadsspvkagvetttpskqsnnkyaassylsltpeqwkshrsyscqvthegstvektvaptecs** |
| 517 | WW0723 | EVQLVESGGGLVQPGNSLRLSCAASGFTFSKFGMSWVRQAPGKGLEWVSSIS |
| | | GSGRDTLYAESVKGRFTISRDNAKTTLYLQMNSLRPEDTAVYYCTIGGSLSVS |
| | | SQGTLVTVSSsggpALFKSSFPpgsiwelkkdvyvveldwypdapgemvvltcdtpeedgitwtldqss |
| | | evlgsgktltiqvkefgdagqytchkggevlshsllllhkkedgiwstdilkdqkepknktflrceaknysgrftcwwltti |
| | | stdltfsvkssrgssdpqgvtcgaatlsaervrgdnkeyeysvecqedsacpaaeeslpievmvdavhklkyenytssff |
| | | irdiikpdppknlqlkplknsrqvevsweypdtwstphsyfsltfcvqvqgkskrekkdrvftdktsatvicrknasisvr |
| | | aqdryyssswsewasvpcsggggsggggsggggsrnlpvatpdpgmfpclhhsqnllravsnmlqkarqtlefypct |
| | | seeidheditkdktstveaclpleltknesclnsretsfitngsclasrktsfmmalclssiyedlkmyqvefktmnakllm |
| | | dpkrqifldqnmlavidelmqalnfnsetvpqkssleepdfyktkiklcillhafriravtidrvmsylnassggpALFK |
| | | SSFPpgsggggsggggsggggsggggsggggsggggsQSVLTQPPSVSGAPGQRVTISCSGSRS |
| | | NIGeNTVKWYQQLPGTAPKLLIYYNDQRPSGVPDRFSGSKSGTSASLAITGLQA |
| | | EDEADYYCQSYDRYTHPALLFGTGTKVTVLgqpkaapsvtlfppsseelqankatlvclisdlyp |
| | | gavtvawkadsspvkagvetttpskqsnnkyaassylsltpeqwkshrsyscqvthegstvektvaptecs** |
| 518 | WW0724 | EVQLVESGGGLVQPGNSLRLSCAASGFTFSKFGMSWVRQAPGKGLEWVSSIS |
| | | GSGRDTLYAESVKGRFTISRDNAKTTLYLQMNSLRPEDTAVYYCTIGGSLSVS |
| | | SQGTLVTVSSsggpALFKSSFPpgsiwelkkdvyvveldwypdapgemvvltcdtpeedgitwtldqss |
| | | evlgsgktltiqvkefgdagqytchkggevlshsllllhkkedgiwstdilkdqkepknktflrceaknysgrftcwwltti |
| | | stdltfsvkssrgssdpqgvtcgaatlsaervrgdnkeyeysvecqedsacpaaeeslpievmvdavhklkyenytssff |
| | | irdiikpdppknlqlkplknsrqvevsweypdtwstphsyfsltfcvqvqgkskrekkdrvftdktsatvicrknasisvr |
| | | aqdryyssswsewasvpcsggggsggggsggggsrvipvsgparclsqsrnllkttddmvktareklkhysctaedid |
| | | heditrdqtstlktclplelhknesclatretssttrgsclppqktslmmtlclgsiyedlkmyqtefqainaalqnlmhqqiil |
| | | dkgmlvaidelmqslnhngetlrqkppvgeadpyrvkmklcillhafstrvvtinrvmgylssasggpALFKSSF |
| | | PpgsggggsggggsggggsggggsggggsggggsQSVLTQPPSVSGAPGQRVTISCSGSRSNI |
| | | GeeTVKWYQQLPGTAPKLLIYYNDQRPSGVPDRFSGSKSGTSASLAITGLQAED |
| | | EADYYCQSYDRYTHPALLFGTGTKVTVLgqpkaapsvtlfppsseelqankatlvclisdlypga |
| | | vtvawkadsspvkagvetttpskqsimkyaassylsltpeqwkshrsyscqvthegstvektvaptecs** |
| 519 | WW0725 | EVQLVESGGGLVQPGNSLRLSCAASGFTFSKFGMSWVRQAPGKGLEWVSSIS |
| | | GSGRDTLYAESVKGRFTISRDNAKTTLYLQMNSLRPEDTAVYYCTIGGSLSVS |
| | | SQGTLVTVSSsggpALFKSSFPpgsiwelkkdvyweldwypdapgemwltcdtpeedgitwtldqss |
| | | evlgsgktltiqvkefgdagqytchkggevlshsllllhkkedgiwstdilkdqkepknktflrceaknysgrftcwwltti |
| | | stdltfsvkssrgssdpqgvtcgaatlsaervrgdnkeyeysvecqedsacpaaeeslpievmvdavhklkyenytssff |
| | | irdiikpdppknlqlkplknsrqvevsweypdtwstphsyfsltfcvqvqgkskrekkdrvftdktsatvicrknasisvr |
| | | aqdryyssswsewasvpcsggggsggggsggggsrnlpvatpdpgmfpclhhsqnllravsnmlqkarqtlefypct |
| | | seeidheditkdktstveaclpleltknesclnsretsfitngsclasrktsfmmalclssiyedlkmyqvefktmnakllm |
| | | dpkrqifldqnmlavidelmqalnfnsetvpqkssleepdfyktkiklcillhafriravtidrvmsylnassggpALFK |
| | | SSFPpgsggggsggggsggggsggggsggggsggggsQSVLTQPPSVSGAPGQRVTISCSGSRS |
| | | NIGeeTVKWYQQLPGTAPKLLIYYNDQRPSGVPDRFSGSKSGTSASLAITGLQA |
| | | EDEADYYCQSYDRYTHPALLFGTGTKVTVLgqpkaapsvtlfppsseelqankatlvclisdfyp |
| | | gavtvawkadsspvkagvetttpskqsnnkyaassylsltpeqwkshrsyscqvthegstvektvaptecs** |
| 520 | WW0726 | QVQLVESGGGVVQPGRSLRLSCAASGFTFSSYGMHWVRQAPGKGLEWVAFIR |
| | | YDGSNKYYADSVKGRFTISRDNSKNTLYLQMNSLRAEDTAVYYCKTHGSHD |
| | | NWGQGTMVTVSSastkgpsvfplapsskstsggtaalgclvkdyfpepvtvswnsgaltsgvhtfpavlqssgl |
| | | yslssvvtvpssslgtqtyicnvnhkpsntkvdkrvepksc** |
| 521 | WW0727 | QVQLVESGGGVVQPGRSLRLSCAASGFTFSSYGMHWVRQAPGKGLEWVAFIR |
| | | YeGSNKYYAeSVKGRFTISRDNSKNTLYLQMNSLRAEDTAVYYCKTHGSHDN |
| | | WGQGTMVTVSSastkgpsvfplapsskstsggtaalgclvkdyfpepvtvswnsgaltsgvhtfpavlqssgly |
| | | slssvvtvpssslgtqtyicnvnhkpsntkvdkrvepksc** |
| 522 | WW0728 | QVQLVESGGGVVQPGRSLRLSCAASGFTFSSYGMHWVRQAPGKGLEWVAFIR |
| | | YeGSNKYYADSVKGRFTISRDNSKNTLYLQMNSLRAEDTAVYYCKTHGSHDN |
| | | WGQGTMVTVSSastkgpsvfplapsskstsggtaalgclvkdyfpepvtvswnsgaltsgvhtfpavlqssgly |
| | | slssvvtvpssslgtqtyicnvnhkpsntkvdkrvepksc** |
| 523 | WW0765 | iwelkkdvyweldwypdapgemwltcdtpeedgitwtldqssevlgsgktltiqvkefgdagqytchkggevlshs |
| | | llllhkkedgiwstdilkdqkepknktflrceaknysgrftcwwlttistdltfsvkssrgssdpqgvtcgaatlsaervrgd |
| | | nkeyeysvecqedsacpaaeeslpievmvdavhklkyenytssffirdiikpdppknlqlkplknsrqvevsweypdt |
| | | wstphsyfsltfcvqvqgkskrekkdrvftdktsatvicrknasisvraqdryyssswsewasvpcsggggsggggsgg |
| | | ggsrvipvsgparclsqsrnllkttddmvktareklkhysctaedidheditrdqtstlktclplelhknesclatretssttr |
| | | gsclppqktslmmtlclgsiyedlkmyqtefqainaalqnhnhqqiildkgmlvaidelmqslnhngetlrqkppvgead |
| | | pyrvkmklcillhafstrvvtinrvmgylssasggpGPAGLYAQpgsEVQLVESGGGLVQPGNSL |
| | | RLSCAASGFTFSKFGMSWVRQAPGKGLEWVSSISGSGRDTLYAESVKGRFTIS |
| | | RDNAKTTLYLQMNSLRPEDTAVYYCTIGGSLSVSSQGTLVTVSSggggsggggsgg |
| | | ggsggggsggggsggggsQSVLTQPPSVSGAPGQRVTISCSGSRSNIGSNTVKWYQQLP |
| | | GTAPKLLIYYNDQRPSGVPDRFSGSKSGTSASLAITGLQAEDEADYYCQSYDR |
| | | YTHPALLFGTGTKVTVLggggSggggSggggSQVQLVESGGGVVQPGRSLRLSCAA |
| | | SGFTFSSYGMHWVRQAPGKGLEWVAFIRYeGSNKYYAeSVKGRFTISRDNSKN |
| | | TLYLQMNSLRAEDTAVYYCKTHGSHDNWGQGTMVTVSS** |
| 524 | WW0766 | iwelkkdvyvveldwypdapgemvvltcdtpeedgitwtldqssevlgsgktltiqvkefgdagqytchkggevlshs |
| | | llllhkkedgiwstdilkdqkepknktflrceaknysgrftcwwlttistdltfsvkssrgssdpqgvtcgaatlsaervrgd |
| | | nkeyeysvecqedsacpaaeeslpievmvdavhklkyenytssffirdiikpdppknlqlkplknsrqvevsweypdt |
| | | wstphsyfsltfcvqvqgkskrekkdrvftdktsatvicrknasisvraqdryyssswsewasvpcsggggsggggsgg |
| | | ggsrnlpvatpdpgmfpclhhsqnllravsnmlqkarqtlefypctseeidheditkdktstveaclpleltknesclnsre |
| | | tsfitngsclasrktsfmmalclssiyedlkmyqvefktmnakllmdpkrqifldqnmlavidelmqalnfnsetvpqk |
| | | ssleepdfyktkiklcillhafriravtidrvmsylnassggpGPAGLYAQpgsEVQLVESGGGLVQPG |
| | | NSLRLSCAASGFTFSKFGMSWVRQAPGKGLEWVSSISGSGRDTLYAESVKGRF |
| | | TISRDNAKTTLYLQMNSLRPEDTAVYYCTIGGSLSVSSQGTLVTVSSggggsgggg |
| | | sggggsggggsggggsggggsQSVLTQPPSVSGAPGQRVTISCSGSRSNIGSNTVKWYQ |
| | | QLPGTAPKLLIYYNDQRPSGVPDRFSGSKSGTSASLAITGLQAEDEADYYCQS |
| | | YDRYTHPALLFGTGTKVTVLggggsggggsggggsQVQLVESGGGVVQPGRSLRLS |
| | | CAASGFTFSSYGMHWVRQAPGKGLEWVAFIRYeGSNKYYAeSVKGRFTISRD |
| | | NSKNTLYLQMNSLRAEDTAVYYCKTHGSHDNWGQGTMVTVSS** |
| 525 | WW0767 | iwelkkdvyweldwypdapgemwltcdtpeedgitwtldqssevlgsgktltiqvkefgdagqytchkggevlshs |
| | | llllhkkedgiwstdilkdqkepknktflrceaknysgrftcwwlttistdltfsvkssrgssdpqgvtcgaatlsaervrgd |
| | | nkeyeysvecqedsacpaaeeslpievmvdavhklkyenytssffirdiikpdppknlqlkplknsrqvevsweypdt |
| | | wstphsyfsltfcvqvqgkskrekkdrvftdktsatvicrknasisvraqdryyssswsewasvpcsggggsggggsgg |
| | | ggsrvipvsgparclsqsrnllkttddmvktareklkhysctaedidheditrdqtstlktclplelhknesclatretssttr |
| | | gsclppqktslmmtlclgsiyedlkmyqtefqainaalqnhnhqqiildkgmlvaidelmqslnhngetlrqkppvgead |
| | | pyrvkmklcillhafstrvvtinrvmgylssasggpGPAGLYAQpgsEVQLVESGGGLVQPGNSL |
| | | RLSCAASGFTFSKFGMSWVRQAPGKGLEWVSSISGSGRDTLYAESVKGRFTIS |
| | | RDNAKTTLYLQMNSLRPEDTAVYYCTIGGSLSVSSQGTLVTVSSggggsggggsgg |
| | | ggsggggsggggsggggsQSVLTQPPSVSGAPGQRVTISCSGSRSNIGdeTVKWYQQLP |
| | | GTAPKLLIYYNDQRPSGVPDRFSGSKSGTSASLAITGLQAEDEADYYCQSYDR |
| | | YTHPALLFGTGTKVTVLggggsggggsggggsQVQLVESGGGVVQPGRSLRLSCAA |
| | | SGFTFSSYGMHWVRQAPGKGLEWVAFIRYeGSNKYYAeSVKGRFTISRDNSKN |
| | | TLYLQMNSLRAEDTAVYYCKTHGSHDNWGQGTMVTVSS** |
| 526 | WW0768 | iwelkkdvyweldwypdapgemwltcdtpeedgitwtldqssevlgsgktltiqvkefgdagqytchkggevlshs |
| | | llllhkkedgiwstdilkdqkepknktflrceaknysgrftcwwlttistdltfsvkssrgssdpqgvtcgaatlsaervrgd |
| | | nkeyeysvecqedsacpaaeeslpievmvdavhklkyenytssffirdiikpdppknlqlkplknsrqvevsweypdt |
| | | wstphsyfsltfcvqvqgkskrekkdrvftdktsatvicrknasisvraqdryyssswsewasvpcsggggsggggsgg |
| | | ggsrnlpvatpdpgmfpclhhsqnllravsnmlqkarqtlefypctseeidheditkdktstveaclpleltknesclnsre |
| | | tsfitngsclasrktsfmmalclssiyedlkmyqvefktmnakllmdpkrqifldqnmlavidelmqalnfnsetvpqk |
| | | ssleepdfyktkiklcillhafriravtidrvmsylnassggpGPAGLYAQpgsEVQLVESGGGLVQPG |
| | | NSLRLSCAASGFTFSKFGMSWVRQAPGKGLEWVSSISGSGRDTLYAESVKGRF |
| | | TISRDNAKTTLYLQMNSLRPEDTAVYYCTIGGSLSVSSQGTLVTVSSggggsgggg |
| | | sggggsggggsggggsggggsQSVLTQPPSVSGAPGQRVTISCSGSRSNIGdeTVKWYQQ |
| | | LPGTAPKLLIYYNDQRPSGVPDRFSGSKSGTSASLAITGLQAEDEADYYCQSY |
| | | DRYTHPALLFGTGTKVTVLggggsggggSggggsQVQLVESGGGVVQPGRSLRLSC |
| | | AASGFTFSSYGMHWVRQAPGKGLEWVAFIRYeGSNKYYAeSVKGRFTISRDNS |
| | | KNTLYLQMNSLRAEDTAVYYCKTHGSHDNWGQGTMVTVSS** |
| 527 | WW0769 | iwelkkdvyweldwypdapgemwltcdtpeedgitwtldqssevlgsgktltiqvkefgdagqytchkggevlshs |
| | | llllhkkedgiwstdilkdqkepknktflrceaknysgrftcwwlttistdltfsvkssrgssdpqgvtcgaatlsaervrgd |
| | | nkeyeysvecqedsacpaaeeslpievmvdavhklkyenytssffirdiikpdppknlqlkplknsrqvevsweypdt |
| | | wstphsyfsltfcvqvqgkskrekkdrvftdktsatvicrknasisvraqdryyssswsewasvpcsggggsggggsgg |
| | | ggsrvipvsgparclsqsrnllkttddmvktareklkhysctaedidheditrdqtstlktclplelhknesclatretssttr |
| | | gsclppqktslmmtlclgsiyedlkmyqtefqainaalqnhnhqqiildkgmlvaidelmqslnhngetlrqkppvgead |
| | | pyrvkmklcillhafstrvvtinrvmgylssasggpGPAGLYAQpgsEVQLVESGGGLVQPGNSL |
| | | RLSCAASGFTFSKFGMSWVRQAPGKGLEWVSSISGSGRDTLYAESVKGRFTIS |
| | | RDNAKTTLYLQMNSLRPEDTAVYYCTIGGSLSVSSQGTLVTVSSggggsggggsgg |
| | | ggsggggsggggsggggsQSVLTQPPSVSGAPGQRVTISCSGSRSNIGSNTVKWYQQLP |
| | | GTAPKLLIYYNDQRPSGVPDRFSGSKSGTSASLAITGLQAEDEADYYCQSYDR |
| | | YTHPALLFGTGTKVTVLgqpkaapsvtlfppsseelqankatlvclisdfypgavtvawkadsspvkagv |
| | | etttpskqsnnkyaassylsltpeqwkshrsyscqvthegstvektvaptecs** |
| 528 | WW0770 | iwelkkdvyweldwypdapgemwltcdtpeedgitwtldqssevlgsgktltiqvkefgdagqytchkggevlshs |
| | | llllhkkedgiwstdilkdqkepknktflrceaknysgrftcwwlttistdltfsvkssrgssdpqgvtcgaatlsaervrgd |
| | | nkeyeysvecqedsacpaaeeslpievmvdavhklkyenytssffirdiikpdppknlqlkplknsrqvevsweypdt |
| | | wstphsyfsltfcvqvqgkskrekkdrvftdktsatvicrknasisvraqdryyssswsewasvpcsggggsggggsgg |
| | | ggsrnlpvatpdpgmfpclhhsqnllravsnmlqkarqtlefypctseeidheditkdktstveaclpleltknesclnsre |
| | | tsfitngsclasrktsfmmalclssiyedlkmyqvefktmnakllmdpkrqifldqnmlavidelmqalnfnsetvpqk |
| | | ssleepdfyktkiklcillhafriravtidrvmsylnassggpGPAGLYAQpgsEVQLVESGGGLVQPG |
| | | NSLRLSCAASGFTFSKFGMSWVRQAPGKGLEWVSSISGSGRDTLYAESVKGRF |
| | | TISRDNAKTTLYLQMNSLRPEDTAVYYCTIGGSLSVSSQGTLVTVSSggggsgggg |
| | | sggggsggggsggggsggggsQSVLTQPPSVSGAPGQRVTISCSGSRSNIGSNTVKWYQ |
| | | QLPGTAPKLLIYYNDQRPSGVPDRFSGSKSGTSASLAITGLQAEDEADYYCQS |
| | | YDRYTHPALLFGTGTKVTVLgqpkaapsvtlfppsseelqankatlvclisdfypgavtvawkadsspv |
| | | kagvetttpskqsnnkyaassylsltpeqwkshrsyscqvthegstvektvaptecs** |
| 529 | WW0771 | iwelkkdvyweldwypdapgemwltcdtpeedgitwtldqssevlgsgktltiqvkefgdagqytchkggevlshs |
| | | llllhkkedgiwstdilkdqkepknktflrceaknysgrftcwwlttistdltfsvkssrgssdpqgvtcgaatlsaervrgd |
| | | nkeyeysvecqedsacpaaeeslpievmvdavhklkyenytssffirdiikpdppknlqlkplknsrqvevsweypdt |
| | | wstphsyfsltfcvqvqgkskrekkdrvftdktsatvicrknasisvraqdryyssswsewasvpcsggggsggggsgg |
| | | ggsrvipvsgparclsqsrnllkttddmvktareklkhysctaedidheditrdqtstlktclplelhknesclatretssttr |
| | | gsclppqktslmmtlclgsiyedlkmyqtefqainaalqnhnhqqiildkgmlvaidelmqslnhngetlrqkppvgead |
| | | pyrvkmklcillhafstrvvtinrvmgylssasggpGPAGLYAQpgsEVQLVESGGGLVQPGNSL |
| | | RLSCAASGFTFSKFGMSWVRQAPGKGLEWVSSISGSGRDTLYAESVKGRFTIS |
| | | RDNAKTTLYLQMNSLRPEDTAVYYCTIGGSLSVSSQGTLVTVSSggggsggggsgg |
| | | ggsggggsggggsggggsQSVLTQPPSVSGAPGQRVTISCSGSRSNIGdeTVKWYQQLP |
| | | GTAPKLLIYYNDQRPSGVPDRFSGSKSGTSASLAITGLQAEDEADYYCQSYDR |
| | | YTHPALLFGTGTKVTVLgqpkaapsvtlfppsseelqankatlvclisdfypgavtvawkadsspvkagv |
| | | etttpskqsnnkyaassylsltpeqwkshrsyscqvthegstvektvaptecs** |
| 530 | WW0772 | iwelkkdvyweldwypdapgemwltcdtpeedgitwtldqssevlgsgktltiqvkefgdagqytchkggevlshs |
| | | llllhkkedgiwstdilkdqkepknktflrceaknysgrftcwwlttistdltfsvkssrgssdpqgvtcgaatlsaervrgd |
| | | nkeyeysvecqedsacpaaeeslpievmvdavhklkyenytssffirdiikpdppknlqlkplknsrqvevsweypdt |
| | | wstphsyfsltfcvqvqgkskrekkdrvftdktsatvicrknasisvraqdryyssswsewasvpcsggggsggggsgg |
| | | ggsrnlpvatpdpgmfpclhhsqnllravsnmlqkaiqtlefypctseeidheditkdktstveaclpleltknesclnsre |
| | | tsfitngsclasrktsfmmalclssiyedlkmyqvefktmnakllmdpkrqifldqnmlavidelmqalnfnsetvpqk |
| | | ssleepdfyktkiklcillhafriravtidrvmsylnassggpGPAGLYAQpgsEVQLVESGGGLVQPG |
| | | NSLRLSCAASGFTFSKFGMSWVRQAPGKGLEWVSSISGSGRDTLYAESVKGRF |
| | | TISRDNAKTTLYLQMNSLRPEDTAVYYCTIGGSLSVSSQGTLVTVSSggggsgggg |
| | | sggggsggggsggggsggggsQSVLTQPPSVSGAPGQRVTISCSGSRSNIGdeTVKWYQQ |
| | | LPGTAPKLLIYYNDQRPSGVPDRFSGSKSGTSASLAITGLQAEDEADYYCQSY |
| | | DRYTHPALLFGTGTKVTVLgqpkaapsvtlfppsseelqankatlvclisdfypgavtvawkadsspvka |
| | | gvetttpskqsnnkyaassylsltpeqwkshrsyscqvthegstvektvaptecs** |
| 531 | WW0796 | iwelkkdvyweldwypdapgemwltcdtpeedgitwtldqssevlgsgktltiqvkefgdagqytchkggevlshs |
| | | llllhkkedgiwstdilkdqkepknktflrceaknysgrftcwwlttistdltfsvkssrgssdpqgvtcgaatlsaervrgd |
| | | nkeyeysvecqedsacpaaeeslpievmvdavhklkyenytssffirdiikpdppknlqlkplknsrqvevsweypdt |
| | | wstphsyfsltfcvqvqgkskrekkdrvftdktsatvicrknasisvraqdryyssswsewasvpcsggggsggggsgg |
| | | ggsrvipvsgparclsqsrnllkttddmvktareklkhysctaedidheditrdqtstlktclplelhknesclatretssttr |
| | | gsclppqktslmmtlclgsiyedlkmyqtefqainaalqnhnhqqiildkgmlvaidelmqslnhngetlrqkppvgead |
| | | pyrvkmklcillhafstrvvtinrvmgylssasggpALFKSSFPpgsEVQLVESGGGLVQPGNSLR |
| | | LSCAASGFTFSKFGMSWVRQAPGKGLEWVSSISGSGRDTLYAESVKGRFTISR |
| | | DNAKTTLYLQMNSLRPEDTAVYYCTIGGSLSVSSQGTLVTVSSggggsggggsgggg |
| | | sggggsggggsggggsQSVLTQPPSVSGAPGQRVTISCSGSRSNIGSNTVKWYQQLPG |
| | | TAPKLLIYYNDQRPSGVPDRFSGSKSGTSASLAITGLQAEDEADYYCQSYDRY |
| | | THPALLFGTGTKVTVLggggsggggsggggsQVQLVESGGGWQPGRSLRLSCAAS |
| | | GFTFSSYGMHWVRQAPGKGLEWVAFIRYeGSNKYYAeSVKGRFTISRDNSKN |
| | | TLYLQMNSLRAEDTAVYYCKTHGSHDNWGQGTMVTVSS** |
| 532 | WW0797 | iwelkkdvyvveldwypdapgemvvltcdtpeedgitwtldqssevlgsgktltiqvkefgdagqytchkggevlshs |
| | | llllhkkedgiwstdilkdqkepknktflrceaknysgrftcwwlttistdltfsvkssrgssdpqgvtcgaatlsaervrgd |
| | | nkeyeysvecqedsacpaaeeslpievmvdavhklkyenytssffirdiikpdppknlqlkplknsrqvevsweypdt |
| | | wstphsyfsltfcvqvqgkskrekkdrvftdktsatvicrknasisvraqdryyssswsewasvpcsggggsggggsgg |
| | | ggsrnlpvatpdpgmfpclhhsqnllravsnmlqkarqtlefypctseeidheditkdktstveaclpleltknesclnsre |
| | | tsfitngsclasrktsfmmalclssiyedlkmyqvefktmnakllmdpkrqifldqnmlavidelmqalnfnsetvpqk |
| | | ssleepdfyktkiklcillhafriravtidrvmsylnassggpALFKSSFPpgsEVQLVESGGGLVQPGN |
| | | SLRLSCAASGFTFSKFGMSWVRQAPGKGLEWVSSISGSGRDTLYAESVKGRFT |
| | | ISRDNAKTTLYLQMNSLRPEDTAVYYCTIGGSLSVSSQGTLVTVSSggggsggggsg |
| | | gggsggggsggggsggggsQSVLTQPPSVSGAPGQRVTISCSGSRSNIGSNTVKWYQQL |
| | | PGTAPKLLIYYNDQRPSGVPDRFSGSKSGTSASLAITGLQAEDEADYYCQSYD |
| | | RYTHPALLFGTGTKVTVLggggsggggsggggsQVQLVESGGGWQPGRSLRLSCA |
| | | ASGFTFSSYGMHWVRQAPGKGLEWVAFIRYeGSNKYYAeSVKGRFTISRDNSK |
| | | NTLYLQMNSLRAEDTAVYYCKTHGSHDNWGQGTMVTVSS** |
| 533 | WW0798 | iwelkkdvyweldwypdapgemwltcdtpeedgitwtldqssevlgsgktltiqvkefgdagqytchkggevlshs |
| | | llllhkkedgiwstdilkdqkepknktflrceaknysgrftcwwlttistdltfsvkssrgssdpqgvtcgaatlsaervrgd |
| | | nkeyeysvecqedsacpaaeeslpievmvdavhklkyenytssffirdiikpdppknlqlkplknsrqvevsweypdt |
| | | wstphsyfsltfcvqvqgkskrekkdrvftdktsatvicrknasisvraqdryyssswsewasvpcsggggsggggsgg |
| | | ggsrvipvsgparclsqsrnllkttddmvktareklkhysctaedidheditrdqtstlktclplelhknesclatretssttr |
| | | gsclppqktslmmtlclgsiyedlkmyqtefqainaalqnhnhqqiildkgmlvaidelmqslnhngetlrqkppvgead |
| | | pyrvkmklcillhafstrvvtinrvmgylssasggpALFKSSFPpgsEVQLVESGGGLVQPGNSLR |
| | | LSCAASGFTFSKFGMSWVRQAPGKGLEWVSSISGSGRDTLYAESVKGRFTISR |
| | | DNAKTTLYLQMNSLRPEDTAVYYCTIGGSLSVSSQGTLVTVSSggggsggggsgggg |
| | | sggggsggggsggggsQSVLTQPPSVSGAPGQRVTISCSGSRSNIGdeTVKWYQQLPGT |
| | | APKLLIYYNDQRPSGVPDRFSGSKSGTSASLAITGLQAEDEADYYCQSYDRYT |
| | | HPALLFGTGTKVTVLggggsggggsggggsQVQLVESGGGWQPGRSLRLSCAASGF |
| | | TFSSYGMHWVRQAPGKGLEWVAFIRYeGSNKYYAeSVKGRFTISRDNSKNTL |
| | | YLQMNSLRAEDTAVYYCKTHGSHDNWGQGTMVTVSS** |
| 534 | WW0799 | iwelkkdvyweldwypdapgemwltcdtpeedgitwtldqssevlgsgktltiqvkefgdagqytchkggevlshs |
| | | llllhkkedgiwstdilkdqkepknktflrceaknysgrftcwwlttistdltfsvkssrgssdpqgvtcgaatlsaervrgd |
| | | nkeyeysvecqedsacpaaeeslpievmvdavhklkyenytssffirdiikpdppknlqlkplknsrqvevsweypdt |
| | | wstphsyfsltfcvqvqgkskrekkdrvftdktsatvicrknasisvraqdryyssswsewasvpcsggggsggggsgg |
| | | ggsrnlpvatpdpgmfpclhhsqnllravsnmlqkarqtlefypctseeidheditkdktstveaclpleltknesclnsre |
| | | tsfitngsclasrktsfmmalclssiyedlkmyqvefktmnakllmdpkrqifldqnmlavidelmqalnfnsetvpqk |
| | | ssleepdfyktkiklcillhafriravtidrvmsylnassggpALFKSSFPpgsEVQLVESGGGLVQPGN |
| | | SLRLSCAASGFTFSKFGMSWVRQAPGKGLEWVSSISGSGRDTLYAESVKGRFT |
| | | ISRDNAKTTLYLQMNSLRPEDTAVYYCTIGGSLSVSSQGTLVTVSSggggsggggsg |
| | | gggsggggsggggSggggsQSVLTQPPSVSGAPGQRVTISCSGSRSNIGdeTVKWYQQL |
| | | PGTAPKLLIYYNDQRPSGVPDRFSGSKSGTSASLAITGLQAEDEADYYCQSYD |
| | | RYTHPALLFGTGTKVTVLggggsggggSggggsQVQLVESGGGVVQPGRSLRLSCA |
| | | ASGFTFSSYGMHWVRQAPGKGLEWVAFIRYeGSNKYYAeSVKGRFTISRDNSK |
| | | NTLYLQMNSLRAEDTAVYYCKTHGSHDNWGQGTMVTVSS** |
| 535 | WW0800 | iwelkkdvyvveldwypdapgemvvltcdtpeedgitwtldqssevlgsgktltiqvkefgdagqytchkggevlshs |
| | | llllhkkedgiwstdilkdqkepknktflrceaknysgrftcwwlttistdltfsvkssrgssdpqgvtcgaatlsaervrgd |
| | | nkeyeysvecqedsacpaaeeslpievmvdavhklkyenytssffirdiikpdppknlqlkplknsrqvevsweypdt |
| | | wstphsyfsltfcvqvqgkskrekkdrvftdktsatvicrknasisvraqdryyssswsewasvpcsggggsggggsgg |
| | | ggsrvipvsgparclsqsrnllkttddmvktareklkhysctaedidheditrdqtstlktclplelhknesclatretssttr |
| | | gsclppqktslmmtlclgsiyedlkmyqtefqainaalqnhnhqqiildkgmlvaidelmqslnhngetlrqkppvgead |
| | | pyrvkmklcillhafstrvvtinrvmgylssasggpALFKSSFPpgsEVQLVESGGGLVQPGNSLR |
| | | LSCAASGFTFSKFGMSWVRQAPGKGLEWVSSISGSGRDTLYAESVKGRFTISR |
| | | DNAKTTLYLQMNSLRPEDTAVYYCTIGGSLSVSSQGTLVTVSSggggsggggsgggg |
| | | sggggsggggsggggsQSVLTQPPSVSGAPGQRVTISCSGSRSNIGSNTVKWYQQLPG |
| | | TAPKLLIYYNDQRPSGVPDRFSGSKSGTSASLAITGLQAEDEADYYCQSYDRY |
| | | THPALLFGTGTKVTVLgqpkaapsvtlfppsseelqankatlvclisdfypgavtvawkadsspvkagvett |
| | | tpskqsnnkyaassylsltpeqwkshrsyscqvthegstvektvaptecs** |
| 536 | WW0801 | iwelkkdvyweldwypdapgemwltcdtpeedgitwtldqssevlgsgktltiqvkefgdagqytchkggevlshs |
| | | llllhkkedgiwstdilkdqkepknktflrceaknysgrftcwwlttistdltfsvkssrgssdpqgvtcgaatlsaervrgd |
| | | nkeyeysvecqedsacpaaeeslpievmvdavhklkyenytssffirdiikpdppknlqlkplknsrqvevsweypdt |
| | | wstphsyfsltfcvqvqgkskrekkdrvftdktsatvicrknasisvraqdryyssswsewasvpcsggggsggggsgg |
| | | ggsrnlpvatpdpgmfpclhhsqnllravsnmlqkarqtlefypctseeidheditkdktstveaclpleltknesclnsre |
| | | tsfitngsclasrktsfmmalclssiyedlkmyqvefktmnakllmdpkrqifldqnmlavidelmqalnfnsetvpqk |
| | | ssleepdfyktkiklcillhafriravtidrvmsylnassggpALFKSSFPpgsEVQLVESGGGLVQPGN |
| | | SLRLSCAASGFTFSKFGMSWVRQAPGKGLEWVSSISGSGRDTLYAESVKGRFT |
| | | ISRDNAKTTLYLQMNSLRPEDTAVYYCTIGGSLSVSSQGTLVTVSSggggsggggsg |
| | | gggsggggsggggsggggsQSVLTQPPSVSGAPGQRVTISCSGSRSNIGSNTVKWYQQL |
| | | PGTAPKLLIYYNDQRPSGVPDRFSGSKSGTSASLAITGLQAEDEADYYCQSYD |
| | | RYTHPALLFGTGTKVTVLgqpkaapsvtlfppsseelqankatlvclisdfypgavtvawkadsspvkag |
| | | vetttpskqsnnkyaassylsltpeqwkshrsyscqvthegstvektvaptecs** |
| 537 | WW0802 | iwelkkdvyweldwypdapgemwltcdtpeedgitwtldqssevlgsgktltiqvkefgdagqytchkggevlshs |
| | | llllhkkedgiwstdilkdqkepknktflrceaknysgrftcwwlttistdltfsvkssrgssdpqgvtcgaatlsaervrgd |
| | | nkeyeysvecqedsacpaaeeslpievmvdavhklkyenytssffirdiikpdppknlqlkplknsrqvevsweypdt |
| | | wstphsyfsltfcvqvqgkskrekkdrvftdktsatvicrknasisvraqdryyssswsewasvpcsggggsggggsgg |
| | | ggsrvipvsgparclsqsrnllkttddmvktareklkhysctaedidheditrdqtstlktclplelhknesclatretssttr |
| | | gsclppqktslmmtlclgsiyedlkmyqtefqainaalqnhnhqqiildkgmlvaidelmqslnhngetlrqkppvgead |
| | | pyrvkmklcillhafstrvvtinrvmgylssasggpALFKSSFPpgsEVQLVESGGGLVQPGNSLR |
| | | LSCAASGFTFSKFGMSWVRQAPGKGLEWVSSISGSGRDTLYAESVKGRFTISR |
| | | DNAKTTLYLQMNSLRPEDTAVYYCTIGGSLSVSSQGTLVTVSSggggsggggsgggg |
| | | sggggsggggsggggsQSVLTQPPSVSGAPGQRVTISCSGSRSNIGdeTVKWYQQLPGT |
| | | APKLLIYYNDQRPSGVPDRFSGSKSGTSASLAITGLQAEDEADYYCQSYDRYT |
| | | HPALLFGTGTKVTVLgqpkaapsvtlfppsseelqankatlvclisdfypgavtvawkadsspvkagvettt |
| | | pskqsimkyaassylsltpeqwkshrsyscqvthegstvektvaptecs** |
| 538 | WW0803 | iwelkkdvyweldwypdapgemwltcdtpeedgitwtldqssevlgsgktltiqvkefgdagqytchkggevlshs |
| | | llllhkkedgiwstdilkdqkepknktflrceaknysgrftcwwlttistdltfsvkssrgssdpqgvtcgaatlsaervrgd |
| | | nkeyeysvecqedsacpaaeeslpievmvdavhklkyenytssffirdiikpdppknlqlkplknsrqvevsweypdt |
| | | wstphsyfsltfcvqvqgkskrekkdrvftdktsatvicrknasisvraqdryyssswsewasvpcsggggsggggsgg |
| | | ggsrnlpvatpdpgmfpclhhsqnllravsnmlqkarqtlefypctseeidheditkdktstveaclpleltknesclnsre |
| | | tsfitngsclasrktsfmmalclssiyedlkmyqvefktmnakllmdpkrqifldqnmlavidelmqalnfnsetvpqk |
| | | ssleepdfyktkiklcillhafriravtidrvmsylnassggpALFKSSFPpgsEVQLVESGGGLVQPGN |
| | | SLRLSCAASGFTFSKFGMSWVRQAPGKGLEWVSSISGSGRDTLYAESVKGRFT |
| | | ISRDNAKTTLYLQMNSLRPEDTAVYYCTIGGSLSVSSQGTLVTVSSggggsggggsg |
| | | gggsggggsggggsggggsQSVLTQPPSVSGAPGQRVTISCSGSRSNIGdeTVKWYQQL |
| | | PGTAPKLLIYYNDQRPSGVPDRFSGSKSGTSASLAITGLQAEDEADYYCQSYD |
| | | RYTHPALLFGTGTKVTVLgqpkaapsvtlfppsseelqankatlvclisdfypgavtvawkadsspvkag |
| | | vetttpskqsnnkyaassylsltpeqwkshrsyscqvthegstvektvaptecs** |
| 539 | WW0643 | EVQLVESGGGLVQPGNSLRLSCAASGFTFSKFGMSWVRQAPGKGLEWVSSIS |
| | | GSGRDTLYAESVKGRFTISRDNAKTTLYLQMNSLRPEDTAVYYCTIGGSLSVS |
| | | SQGTLVTVSSSGGPGPAGLYAQPGSCDLPHTYNLRNKRALKVLAQMRRLTPL |
| | | SCLKDRKDFGFPLEKVDAQQIQKAQSIPVLRDLTQQILNLFASKDSSAAWNAT |
| | | LLDSFCNDLHQQLNDLQGCLMQQVGVQESPLTQEDSLLAVRIYFHRITVFLRE |
| | | KKHSPCAWEVVRAEVWRALSSSANVLGRLREEKASGGPGPAGLYAQPGSEV |
| | | QLVESGGGLVQPGNSLRLSCAASGFTFSKFGMSWVRQAPGKGLEWVSSISGS |
| | | GRDTLYAESVKGRFTISRDNAKTTLYLQMNSLRPEDTAVYYCTIGGSLSVSSQ |
| | | GTLVTVSS |
| 540 | WW0644 | EVQLVESGGGLVQPGNSLRLSCAASGFTFSKFGMSWVRQAPGKGLEWVSSIS |
| | | GSGRDTLYAESVKGRFTISRDNAKTTLYLQMNSLRPEDTAVYYCTIGGSLSVS |
| | | SQGTLVTVSSSGGPALFKSSFPPGSCDLPHTYNLRNKRALKVLAQMRRLTPLS |
| | | CLKDRKDFGFPLEKVDAQQIQKAQSIPVLRDLTQQILNLFASKDSSAAWNATL |
| | | LDSFCNDLHQQLNDLQGCLMQQVGVQESPLTQEDSLLAVRIYFHRITVFLREK |
| | | KHSPCAWEVVRAEVWRALSSSANVLGRLREEKASGGPALFKSSFPPGSEVQL |
| | | VESGGGLVQPGNSLRLSCAASGFTFSKFGMSWVRQAPGKGLEWVSSISGSGR |
| | | DTLYAESVKGRFTISRDNAKTTLYLQMNSLRPEDTAVYYCTIGGSLSVSSQGT |
| | | LVTVSS |
| 541 | WW0645 | EVQLVESGGGLVQPGNSLRLSCAASGFTFSKFGMSWVRQAPGKGLEWVSSIS |
| | | GSGRDTLYAESVKGRFTISRDNAKTTLYLQMNSLRPEDTAVYYCTIGGSLSVS |
| | | SQGTLVTVSSSGGPGPAGLYAQPGSCNLSQTHSLNNRRTLMLMAQMRRISPFS |
| | | CLKDRHDFEFPQEEFDGNQFQKAQAISVLHEMMQQTFNLFSTKNSSAAWDET |
| | | LLEKFYIELFQQMNDLEACVIQEVGVEETPLMNEDSILAVKKYFQRITLYLME |
| | | KKYSPCAWEVVRAEIMRSLSFSTNLQKRLRRKDSGGPGPAGLYAQPGSEVQL |
| | | VESGGGLVQPGNSLRLSCAASGFTFSKFGMSWVRQAPGKGLEWVSSISGSGR |
| | | DTLYAESVKGRFTISRDNAKTTLYLQMNSLRPEDTAVYYCTIGGSLSVSSQGT |
| | | LVTVSS |
| 542 | WW0646 | EVQLVESGGGLVQPGNSLRLSCAASGFTFSKFGMSWVRQAPGKGLEWVSSIS |
| | | GSGRDTLYAESVKGRFTISRDNAKTTLYLQMNSLRPEDTAVYYCTIGGSLSVS |
| | | SQGTLVTVSSSGGPALFKSSFPPGSCNLSQTHSLNNRRTLMLMAQMRRISPFSC |
| | | LKDRHDFEFPQEEFDGNQFQKAQAISVLHEMMQQTFNLFSTKNSSAAWDETL |
| | | LEKFYIELFQQMNDLEACVIQEVGVEETPLMNEDSILAVKKYFQRITLYLMEK |
| | | KYSPCAWEVVRAEIMRSLSFSTNLQKRLRRKDSGGPALFKSSFPPGSEVQLVES |
| | | GGGLVQPGNSLRLSCAASGFTFSKFGMSWVRQAPGKGLEWVSSISGSGRDTL |
| | | YAESVKGRFTISRDNAKTTLYLQMNSLRPEDTAVYYCTIGGSLSVSSQGTLVT |
| | | VSS |
| 543 | WW0647 | CDLPHTYNLRNKRALKVLAQMRRLTPLSCLKDRKDFGFPLEKVDAQQIQKAQ |
| | | SIPVLRDLTQQILNLFASKDSSAAWNATLLDSFCNDLHQQLNDLQGCLMQQV |
| | | GVQESPLTQEDSLLAVRIYFHRITVFLREKKHSPCAWEVVRAEVWRALSSSAN |
| | | VLGRLREEKAHHHHHH |
| 544 | WW0648 | CNLSQTHSLNNRRTLMLMAQMRRISPFSCLKDRHDFEFPQEEFDGNQFQKAQ |
| | | AISVLHEMMQQTFNLFSTKNSSAAWDETLLEKFYIELFQQMNDLEACVIQEVG |
| | | VEETPLMNEDSILAVKKYFQRITLYLMEKKYSPCAWEVVRAEIMRSLSFSTNL |
| | | QKRLRRKDHHHHHH |
| 545 | WW0781 | EVQLVESGGGLVQPGNSLRLSCAASGFTFSKFGMSWVRQAPGKGLEWVSSIS |
| | | GSGRDTLYAESVKGRFTISRDNAKTTLYLQMNSLRPEDTAVYYCTIGGSLSVS |
| | | SQGTLVTVSSSGGPGPAGLYAQPGSCDLPQTHSLGSRRTLMLLAQMRRISLFS |
| | | CLKDRHDFGFPQEEFGNQFQKAETIPVLHEMIQQIFNLFSTKDSSAAWDETLLD |
| | | KFYTELYQQLNDLEACVIQGVGVEETPLMKEDSILAVRKYFQRITLYLKEKKY |
| | | SPCAWEVVRAEIMRSFSLSTNLQESLRSKESGGPGPAGLYAQPGSEVQLVESG |
| | | GGLVQPGNSLRLSCAASGFTFSKFGMSWVRQAPGKGLEWVSSISGSGRDTLY |
| | | AESVKGRFTISRDNAKTTLYLQMNSLRPEDTAVYYCTIGGSLSVSSQGTLVTV |
| | | SS |
| 546 | WW0782 | EVQLVESGGGLVQPGNSLRLSCAASGFTFSKFGMSWVRQAPGKGLEWVSSIS |
| | | GSGRDTLYAESVKGRFTISRDNAKTTLYLQMNSLRPEDTAVYYCTIGGSLSVS |
| | | SQGTLVTVSSSGGPGPAGLYAQPGSCNLSQTHSLNNRRTLMLMAQMRRISPFS |
| | | CLKDRHDFEFPQEEFDGNQFQKAQAISVLHEMMQQTFNLFSTKDSSAAWDET |
| | | LLEKFYIELFQQMNDLEACVIQEVGVEETPLMNEDSILAVKKYFQRITLYLME |
| | | KKYSPCAWEVVRAEIMRSLSFSTNLQKRLRRKDSGGPGPAGLYAQPGSEVQL |
| | | VESGGGLVQPGNSLRLSCAASGFTFSKFGMSWVRQAPGKGLEWVSSISGSGR |
| | | DTLYAESVKGRFTISRDNAKTTLYLQMNSLRPEDTAVYYCTIGGSLSVSSQGT |
| | | LVTVSS |
| 547 | WW0783 | EVQLVESGGGLVQPGNSLRLSCAASGFTFSKFGMSWVRQAPGKGLEWVSSIS |
| | | GSGRDTLYAESVKGRFTISRDNAKTTLYLQMNSLRPEDTAVYYCTIGGSLSVS |
| | | SQGTLVTVSSSGGPGPAGLYAQPGSCDLPQTHSLNNRRTLMLMAQMRRISPFS |
| | | CLKDRHDFEFPQEEFDGNQFQKAQAISVLHEMMQQTFNLFSTKDSSAAWDET |
| | | LLEKFYIELFQQMNDLEACVIQEVGVEETPLMNEDSILAVKKYFQRITLYLME |
| | | KKYSPCAWEVVRAEIMRSLSFSTNLQKRLRRKDSGGPGPAGLYAQPGSEVQL |
| | | VESGGGLVQPGNSLRLSCAASGFTFSKFGMSWVRQAPGKGLEWVSSISGSGR |
| | | DTLYAESVKGRFTISRDNAKTTLYLQMNSLRPEDTAVYYCTIGGSLSVSSQGT |
| | | LVTVSS |
| 548 | WW0784 | CDLPQTHSLGSRRTLMLLAQMRRISLFSCLKDRHDFGFPQEEFGNQFQKAETIP |
| | | VLHEMIQQIFNLFSTKDSSAAWDETLLDKFYTELYQQLNDLEACVIQGVGVEE |
| | | TPLMKEDSILAVRKYFQRITLYLKEKKYSPCAWEVVRAEIMRSFSLSTNLQESL |
| | | RSKEHHHHHH |
| 549 | WW0785 | CNLSQTHSLNNRRTLMLMAQMRRISPFSCLKDRHDFEFPQEEFDGNQFQKAQ |
| | | AISVLHEMMQQTFNLFSTKDSSAAWDETLLEKFYIELFQQMNDLEACVIQEVG |
| | | VEETPLMNEDSILAVKKYFQRITLYLMEKKYSPCAWEVVRAEIMRSLSFSTNL |
| | | QKRLRRKDHHHHHH |
| 550 | WW0786 | CDLPQTHSLNNRRTLMLMAQMRRISPFSCLKDRHDFEFPQEEFDGNQFQKAQ |
| | | AISVLHEMMQQTFNLFSTKDSSAAWDETLLEKFYIELFQQMNDLEACVIQEVG |
| | | VEETPLMNEDSILAVKKYFQRITLYLMEKKYSPCAWEVVRAEIMRSLSFSTNL |
| | | QKRLRRKDHHHHHH |
| 551 | WW0815 | EAHKSEIAHRYNDLGEQHFKGLVLIAFSQYLQKCSYDEHAKLVQEVTDFAKT |
| | | CVADESAANCDKSLHTLFGDKLCAIPNLRENYGELADCCTKQEPERNECFLQH |
| | | KDDNPSLPPFERPEAEAMCTSFKENPTTFMGHYLHEVARRHPYFYAPELLYYA |
| | | EQYNEILTQCCAEADKESCLTPKLDGVKEKALVSSVRQRMKCSSMQKFGERA |
| | | FKAWAVARLSQTFPNADFAEITKLATDLTKVNKECCHGDLLECADDRAELAK |
| | | YMCENQATISSKLQTCCDKPLLKKAHCLSEVEHDTMPADLPAIAADFVEDQE |
| | | VCKNYAEAKDVFLGTFLYEYSRRHPDYSVSLLLRLAKKYEATLEKCCAEANP |
| | | PACYGTVLAEFQPLVEEPKNLVKTNCDLYEKLGEYGFQNAILVRYTQKAPQV |
| | | STPTLVEAARNLGRVGTKCCTLPEDQRLPCVEDYLSAILNRVCLLHEKTPVSE |
| | | HVTKCCSGSLVERRPCFSALTVDETYVPKEFKAETFTFHSDICTLPEKEKQIKK |
| | | QTALAELVKHKPKATAEQLKTVMDDFAQFLDTCCKAADKDTCFSTEGPNLVT |
| | | RCKDALASGGPALFKSSFPPGSCDLPQTHNLRNKRALTLLVQMRRLSPLSCLK |
| | | DRKDFGFPQEKVDAQQIKKAQAIPVLSELTQQILNIFTSKDSSAAWNTTLLDSF |
| | | CNDLHQQLNDLQGCLMQQVGVQEFPLTQEDALLAVRKYFHRITVYLREKKH |
| | | SPCAWEVVRAEVWRALSSSANVLGRLREEKSGGPALFKSSFPPGSEAHKSEIA |
| | | HRYNDLGEQHFKGLVLIAFSQYLQKCSYDEHAKLVQEVTDFAKTCVADESAA |
| | | NCDKSLHTLFGDKLCAIPNLRENYGELADCCTKQEPERNECFLQHKDDNPSLP |
| | | PFERPEAEAMCTSFKENPTTFMGHYLHEVARRHPYFYAPELLYYAEQYNEILT |
| | | QCCAEADKESCLTPKLDGVKEKALVSSVRQRMKCSSMQKFGERAFKAWAVA |
| | | RLSQTFPNADFAEITKLATDLTKVNKECCHGDLLECADDRAELAKYMCENQA |
| | | TISSKLQTCCDKPLLKKAHCLSEVEHDTMPADLPAIAADFVEDQEVCKNYAEA |
| | | KDVFLGTFLYEYSRRHPDYSVSLLLRLAKKYEATLEKCCAEANPPACYGTVL |
| | | AEFQPLVEEPKNLVKTNCDLYEKLGEYGFQNAILVRYTQKAPQVSTPTLVEAA |
| | | RNLGRVGTKCCTLPEDQRLPCVEDYLSAILNRVCLLHEKTPVSEHVTKCCSGS |
| | | LVERRPCFSALTVDETYVPKEFKAETFTFHSDICTLPEKEKQIKKQTALAELVK |
| | | HKPKATAEQLKTVMDDFAQFLDTCCKAADKDTCFSTEGPNLVTRCKDALAH |
| | | HHHHH |
| 552 | WW0816 | EAHKSEIAHRYNDLGEQHFKGLVLIAFSQYLQKCSYDEHAKLVQEVTDFAKT |
| | | CVADESAANCDKSLHTLFGDKLCAIPNLRENYGELADCCTKQEPERNECFLQH |
| | | KDDNPSLPPFERPEAEAMCTSFKENPTTFMGHYLHEVARRHPYFYAPELLYYA |
| | | EQYNEILTQCCAEADKESCLTPKLDGVKEKALVSSVRQRMKCSSMQKFGERA |
| | | FKAWAVARLSQTFPNADFAEITKLATDLTKVNKECCHGDLLECADDRAELAK |
| | | YMCENQATISSKLQTCCDKPLLKKAHCLSEVEHDTMPADLPAIAADFVEDQE |
| | | VCKNYAEAKDVFLGTFLYEYSRRHPDYSVSLLLRLAKKYEATLEKCCAEANP |
| | | PACYGTVLAEFQPLVEEPKNLVKTNCDLYEKLGEYGFQNAILVRYTQKAPQV |
| | | STPTLVEAARNLGRVGTKCCTLPEDQRLPCVEDYLSAILNRVCLLHEKTPVSE |
| | | HVTKCCSGSLVERRPCFSALTVDETYVPKEFKAETFTFHSDICTLPEKEKQIKK |
| | | QTALAELVKHKPKATAEQLKTVMDDFAQFLDTCCKAADKDTCFSTEGPNLVT |
| | | RCKDALASGGPALFKSSFPPGSCDLPHTYNLRNKRALKVLAQMRRLTPLSCLK |
| | | DRKDFGFPLEKVDAQQIQKAQSIPVLRDLTQQILNLFASKDSSAAWNATLLDS |
| | | FCNDLHQQLNDLQGCLMQQVGVQESPLTQEDSLLAVRIYFHRITVFLREKKHS |
| | | PCAWEVVRAEVWRALSSSANVLGRLREEKASGGPALFKSSFPPGSEAHKSEIA |
| | | HRYNDLGEQHFKGLVLIAFSQYLQKCSYDEHAKLVQEVTDFAKTCVADESAA |
| | | NCDKSLHTLFGDKLCAIPNLRENYGELADCCTKQEPERNECFLQHKDDNPSLP |
| | | PFERPEAEAMCTSFKENPTTFMGHYLHEVARRHPYFYAPELLYYAEQYNEILT |
| | | QCCAEADKESCLTPKLDGVKEKALVSSVRQRMKCSSMQKFGERAFKAWAVA |
| | | RLSQTFPNADFAEITKLATDLTKVNKECCHGDLLECADDRAELAKYMCENQA |
| | | TISSKLQTCCDKPLLKKAHCLSEVEHDTMPADLPAIAADFVEDQEVCKNYAEA |
| | | KDVFLGTFLYEYSRRHPDYSVSLLLRLAKKYEATLEKCCAEANPPACYGTVL |
| | | AEFQPLVEEPKNLVKTNCDLYEKLGEYGFQNAILVRYTQKAPQVSTPTLVEAA |
| | | RNLGRVGTKCCTLPEDQRLPCVEDYLSAILNRVCLLHEKTPVSEHVTKCCSGS |
| | | LVERRPCFSALTVDETYVPKEFKAETFTFHSDICTLPEKEKQIKKQTALAELVK |
| | | HKPKATAEQLKTVMDDFAQFLDTCCKAADKDTCFSTEGPNLVTRCKDALAH |
| | | HHHHH |
| 553 | WW0817 | EVQLVESGGGLVQPGNSLRLSCAASGFTFSKFGMSWVRQAPGKGLEWVSSIS |
| | | GSGRDTLYAESVKGRFTISRDNAKTTLYLQMNSLRPEDTAVYYCTIGGSLSVS |
| | | SQGTLVTVSSSGGPALFKSSFPPGSCDLPQTHNLRNKRALTLLVQMRRLSPLSC |
| | | LKDRKDFGFPQEKVDAQQIKKAQAIPVLSELTQQILNIFTSKDSSAAWNTTLLD |
| | | SFCNDLHQQLNDLQGCLMQQVGVQEFPLTQEDALLAVRKYFHRITVYLREKK |
| | | HSPCAWEVVRAEVWRALSSSANVLGRLREEKSGGPALFKSSFPPGSEAHKSEI |
| | | AHRYNDLGEQHFKGLVLIAFSQYLQKCSYDEHAKLVQEVTDFAKTCVADESA |
| | | ANCDKSLHTLFGDKLCAIPNLRENYGELADCCTKQEPERNECFLQHKDDNPSL |
| | | PPFERPEAEAMCTSFKENPTTFMGHYLHEVARRHPYFYAPELLYYAEQYNEIL |
| | | TQCCAEADKESCLTPKLDGVKEKALVSSVRQRMKCSSMQKFGERAFKAWAV |
| | | ARLSQTFPNADFAEITKLATDLTKVNKECCHGDLLECADDRAELAKYMCENQ |
| | | ATISSKLQTCCDKPLLKKAHCLSEVEHDTMPADLPAIAADFVEDQEVCKNYAE |
| | | AKDVFLGTFLYEYSRRHPDYSVSLLLRLAKKYEATLEKCCAEANPPACYGTV |
| | | LAEFQPLVEEPKNLVKTNCDLYEKLGEYGFQNAILVRYTQKAPQVSTPTLVEA |
| | | ARNLGRVGTKCCTLPEDQRLPCVEDYLSAILNRVCLLHEKTPVSEHVTKCCSG |
| | | SLVERRPCFSALTVDETYVPKEFKAETFTFHSDICTLPEKEKQIKKQTALAELV |
| | | KHKPKATAEQLKTVMDDFAQFLDTCCKAADKDTCFSTEGPNLVTRCKDALA |
| | | HHHHHH |
| 554 | WW0818 | EVQLVESGGGLVQPGNSLRLSCAASGFTFSKFGMSWVRQAPGKGLEWVSSIS |
| | | GSGRDTLYAESVKGRFTISRDNAKTTLYLQMNSLRPEDTAVYYCTIGGSLSVS |
| | | SQGTLVTVSSSGGPALFKSSFPPGSCDLPHTYNLRNKRALKVLAQMRRLTPLS |
| | | CLKDRKDFGFPLEKVDAQQIQKAQSIPVLRDLTQQILNLFASKDSSAAWNATL |
| | | LDSFCNDLHQQLNDLQGCLMQQVGVQESPLTQEDSLLAVRIYFHRITVFLREK |
| | | KHSPCAWEVVRAEVWRALSSSANVLGRLREEKASGGPALFKSSFPPGSEAHK |
| | | SEIAHRYNDLGEQHFKGLVLIAFSQYLQKCSYDEHAKLVQEVTDFAKTCVAD |
| | | ESAANCDKSLHTLFGDKLCAIPNLRENYGELADCCTKQEPERNECFLQHKDD |
| | | NPSLPPFERPEAEAMCTSFKENPTTFMGHYLHEVARRHPYFYAPELLYYAEQY |
| | | NEILTQCCAEADKESCLTPKLDGVKEKALVSSVRQRMKCSSMQKFGERAFKA |
| | | WAVARLSQTFPNADFAEITKLATDLTKVNKECCHGDLLECADDRAELAKYM |
| | | CENQATISSKLQTCCDKPLLKKAHCLSEVEHDTMPADLPAIAADFVEDQEVCK |
| | | NYAEAKDVFLGTFLYEYSRRHPDYSVSLLLRLAKKYEATLEKCCAEANPPAC |
| | | YGTVLAEFQPLVEEPKNLVKTNCDLYEKLGEYGFQNAILVRYTQKAPQVSTPT |
| | | LVEAARNLGRVGTKCCTLPEDQRLPCVEDYLSAILNRVCLLHEKTPVSEHVTK |
| | | CCSGSLVERRPCFSALTVDETYVPKEFKAETFTFHSDICTLPEKEKQIKKQTAL |
| | | AELVKHKPKATAEQLKTVMDDFAQFLDTCCKAADKDTCFSTEGPNLVTRCK |
| | | DALAHHHHHH |
| 555 | WW0819 | EAHKSEIAHRYNDLGEQHFKGLVLIAFSQYLQKCSYDEHAKLVQEVTDFAKT |
| | | CVADESAANCDKSLHTLFGDKLCAIPNLRENYGELADCCTKQEPERNECFLQH |
| | | KDDNPSLPPFERPEAEAMCTSFKENPTTFMGHYLHEVARRHPYFYAPELLYYA |
| | | EQYNEILTQCCAEADKESCLTPKLDGVKEKALVSSVRQRMKCSSMQKFGERA |
| | | FKAWAVARLSQTFPNADFAEITKLATDLTKVNKECCHGDLLECADDRAELAK |
| | | YMCENQATISSKLQTCCDKPLLKKAHCLSEVEHDTMPADLPAIAADFVEDQE |
| | | VCKNYAEAKDVFLGTFLYEYSRRHPDYSVSLLLRLAKKYEATLEKCCAEANP |
| | | PACYGTVLAEFQPLVEEPKNLVKTNCDLYEKLGEYGFQNAILVRYTQKAPQV |
| | | STPTLVEAARNLGRVGTKCCTLPEDQRLPCVEDYLSAILNRVCLLHEKTPVSE |
| | | HVTKCCSGSLVERRPCFSALTVDETYVPKEFKAETFTFHSDICTLPEKEKQIKK |
| | | QTALAELVKHKPKATAEQLKTVMDDFAQFLDTCCKAADKDTCFSTEGPNLVT |
| | | RCKDALASGGPALFKSSFPPGSCDLPQTHNLRNKRALTLLVQMRRLSPLSCLK |
| | | DRKDFGFPQEKVDAQQIKKAQAIPVLSELTQQILNIFTSKDSSAAWNTTLLDSF |
| | | CNDLHQQLNDLQGCLMQQVGVQEFPLTQEDALLAVRKYFHRITVYLREKKH |
| | | SPCAWEVVRAEVWRALSSSANVLGRLREEKSGGPALFKSSFPPGSEVQLVESG |
| | | GGLVQPGNSLRLSCAASGFTFSKFGMSWVRQAPGKGLEWVSSISGSGRDTLY |
| | | AESVKGRFTISRDNAKTTLYLQMNSLRPEDTAVYYCTIGGSLSVSSQGTLVTV |
| | | SSHHHHHH |
| 556 | WW0820 | EAHKSEIAHRYNDLGEQHFKGLVLIAFSQYLQKCSYDEHAKLVQEVTDFAKT |
| | | CVADESAANCDKSLHTLFGDKLCAIPNLRENYGELADCCTKQEPERNECFLQH |
| | | KDDNPSLPPFERPEAEAMCTSFKENPTTFMGHYLHEVARRHPYFYAPELLYYA |
| | | EQYNEILTQCCAEADKESCLTPKLDGVKEKALVSSVRQRMKCSSMQKFGERA |
| | | FKAWAVARLSQTFPNADFAEITKLATDLTKVNKECCHGDLLECADDRAELAK |
| | | YMCENQATISSKLQTCCDKPLLKKAHCLSEVEHDTMPADLPAIAADFVEDQE |
| | | VCKNYAEAKDVFLGTFLYEYSRRHPDYSVSLLLRLAKKYEATLEKCCAEANP |
| | | PACYGTVLAEFQPLVEEPKNLVKTNCDLYEKLGEYGFQNAILVRYTQKAPQV |
| | | STPTLVEAARNLGRVGTKCCTLPEDQRLPCVEDYLSAILNRVCLLHEKTPVSE |
| | | HVTKCCSGSLVERRPCFSALTVDETYVPKEFKAETFTFHSDICTLPEKEKQIKK |
| | | QTALAELVKHKPKATAEQLKTVMDDFAQFLDTCCKAADKDTCFSTEGPNLVT |
| | | RCKDALASGGPALFKSSFPPGSCDLPHTYNLRNKRALKVLAQMRRLTPLSCLK |
| | | DRKDFGFPLEKVDAQQIQKAQSIPVLRDLTQQILNLFASKDSSAAWNATLLDS |
| | | FCNDLHQQLNDLQGCLMQQVGVQESPLTQEDSLLAVRIYFHRITVFLREKKHS |
| | | PCAWEVVRAEVWRALSSSANVLGRLREEKASGGPALFKSSFPPGSEVQLVESG |
| | | GGLVQPGNSLRLSCAASGFTFSKFGMSWVRQAPGKGLEWVSSISGSGRDTLY |
| | | AESVKGRFTISRDNAKTTLYLQMNSLRPEDTAVYYCTIGGSLSVSSQGTLVTV |
| | | SSHHHHHH |
| 557 | WW0821 | DAHKSEVAHRFKDLGEENFKALVLIAFAQYLQQCPFEDHVKLVNEVTEFAKT |
| | | CVADESAENCDKSLHTLFGDKLCTVATLRETYGEMADCCAKQEPERNECFLQ |
| | | HKDDNPNLPRLVRPEVDVMCTAFHDNEETFLKKYLYEIARRHPYFYAPELLFF |
| | | AKRYKAAFTECCQAADKAACLLPKLDELRDEGKASSAKQRLKCASLQKFGER |
| | | AFKAWAVARLSQRFPKAEFAEVSKLVTDLTKVHTECCHGDLLECADDRADL |
| | | AKYICENQDSISSKLKECCEKPLLEKSHCIAEVENDEMPADLPSLAADFVESKD |
| | | VCKNYAEAKDVFLGMFLYEYARRHPDYSVVLLLRLAKTYETTLEKCCAAAD |
| | | PHECYAKVFDEFKPLVEEPQNLIKQNCELFEQLGEYKFQNALLVRYTKKVPQV |
| | | STPTLVEVSRNLGKVGSKCCKHPEAKRMPCAEDYLSVVLNQLCVLHEKTPVS |
| | | DRVTKCCTESLVNRRPCFSALEVDETYVPKEFNAETFTFHADICTLSEKERQIK |
| | | KQTALVELVKHKPKATKEQLKAVMDDFAAFVEKCCKADDKETCFAEEGKKL |
| | | VAASQAALGLSGGPALFKSSFPPGSCDLPQTHSLGSRRTLMLLAQMRRISLFSC |
| | | LKDRHDFGFPQEEFGNQFQKAETIPVLHEMIQQIFNLFSTKDSSAAWDETLLDK |
| | | FYTELYQQLNDLEACVIQGVGVTETPLMKEDSILAVRKYFQRITLYLKEKKYS |
| | | PCAWEVVRAEIMRSFSLSTNLQESLRSKESGGPALFKSSFPPGSDAHKSEVAHR |
| | | FKDLGEENFKALVLIAFAQYLQQCPFEDHVKLVNEVTEFAKTCVADESAENC |
| | | DKSLHTLFGDKLCTVATLRETYGEMADCCAKQEPERNECFLQHKDDNPNLPR |
| | | LVRPEVDVMCTAFHDNEETFLKKYLYEIARRHPYFYAPELLFFAKRYKAAFTE |
| | | CCQAADKAACLLPKLDELRDEGKASSAKQRLKCASLQKFGERAFKAWAVAR |
| | | LSQRFPKAEFAEVSKLVTDLTKVHTECCHGDLLECADDRADLAKYICENQDSI |
| | | SSKLKECCEKPLLEKSHCIAEVENDEMPADLPSLAADFVESKDVCKNYAEAKD |
| | | VFLGMFLYEYARRHPDYSVVLLLRLAKTYETTLEKCCAAADPHECYAKVFDE |
| | | FKPLVEEPQNLIKQNCELFEQLGEYKFQNALLVRYTKKVPQVSTPTLVEVSRN |
| | | LGKVGSKCCKHPEAKRMPCAEDYLSVVLNQLCVLHEKTPVSDRVTKCCTESL |
| | | VNRRPCFSALEVDETYVPKEFNAETFTFHADICTLSEKERQIKKQTALVELVKH |
| | | KPKATKEQLKAVMDDFAAFVEKCCKADDKETCFAEEGKKLVAASQAALGL |
| 558 | WW0822 | DAHKSEVAHRFKDLGEENFKALVLIAFAQYLQQCPFEDHVKLVNEVTEFAKT |
| | | CVADESAENCDKSLHTLFGDKLCTVATLRETYGEMADCCAKQEPERNECFLQ |
| | | HKDDNPNLPRLVRPEVDVMCTAFHDNEETFLKKYLYEIARRHPYFYAPELLFF |
| | | AKRYKAAFTECCQAADKAACLLPKLDELRDEGKASSAKQRLKCASLQKFGER |
| | | AFKAWAVARLSQRFPKAEFAEVSKLVTDLTKVHTECCHGDLLECADDRADL |
| | | AKYICENQDSISSKLKECCEKPLLEKSHCIAEVENDEMPADLPSLAADFVESKD |
| | | VCKNYAEAKDVFLGMFLYEYARRHPDYSVVLLLRLAKTYETTLEKCCAAAD |
| | | PHECYAKVFDEFKPLVEEPQNLIKQNCELFEQLGEYKFQNALLVRYTKKVPQV |
| | | STPTLVEVSRNLGKVGSKCCKHPEAKRMPCAEDYLSVVLNQLCVLHEKTPVS |
| | | DRVTKCCTESLVNRRPCFSALEVDETYVPKEFNAETFTFHADICTLSEKERQIK |
| | | KQTALVELVKHKPKATKEQLKAVMDDFAAFVEKCCKADDKETCFAEEGKKL |
| | | VAASQAALGLSGGPALFKSSFPPGSCNLSQTHSLNNRRTLMLMAQMRRISPFS |
| | | CLKDRHDFEFPQEEFDGNQFQKAQAISVLHEMMQQTFNLFSTKNSSAAWDET |
| | | LLEKFYIELFQQMNDLEACVIQEVGVEETPLMNEDSILAVKKYFQRITLYLME |
| | | KKYSPCAWEVVRAEIMRSLSFSTNLQKRLRRKDSGGPALFKSSFPPGSDAHKS |
| | | EVAHRFKDLGEENFKALVLIAFAQYLQQCPFEDHVKLVNEVTEFAKTCVADE |
| | | SAENCDKSLHTLFGDKLCTVATLRETYGEMADCCAKQEPERNECFLQHKDDN |
| | | PNLPRLVRPEVDVMCTAFHDNEETFLKKYLYEIARRHPYFYAPELLFFAKRYK |
| | | AAFTECCQAADKAACLLPKLDELRDEGKASSAKQRLKCASLQKFGERAFKA |
| | | WAVARLSQRFPKAEFAEVSKLVTDLTKVHTECCHGDLLECADDRADLAKYIC |
| | | ENQDSISSKLKECCEKPLLEKSHCIAEVENDEMPADLPSLAADFVESKDVCKN |
| | | YAEAKDVFLGMFLYEYARRHPDYSVVLLLRLAKTYETTLEKCCAAADPHECY |
| | | AKVFDEFKPLVEEPQNLIKQNCELFEQLGEYKFQNALLVRYTKKVPQVSTPTL |
| | | VEVSRNLGKVGSKCCKHPEAKRMPCAEDYLSVVLNQLCVLHEKTPVSDRVT |
| | | KCCTESLVNRRPCFSALEVDETYVPKEFNAETFTFHADICTLSEKERQIKKQTA |
| | | LVELVKHKPKATKEQLKAVMDDFAAFVEKCCKADDKETCFAEEGKKLVAAS |
| | | QAALGL |
| 559 | WW0831 | DAHKSEVAHRFKDLGEENFKALVLIAFAQYLQQCPFEDHVKLVNEVTEFAKT |
| | | CVADESAENCDKSLHTLFGDKLCTVATLRETYGEMADCCAKQEPERNECFLQ |
| | | HKDDNPNLPRLVRPEVDVMCTAFHDNEETFLKKYLYEIARRHPYFYAPELLFF |
| | | AKRYKAAFTECCQAADKAACLLPKLDELRDEGKASSAKQRLKCASLQKFGER |
| | | AFKAWAVARLSQRFPKAEFAEVSKLVTDLTKVHTECCHGDLLECADDRADL |
| | | AKYICENQDSISSKLKECCEKPLLEKSHCIAEVENDEMPADLPSLAADFVESKD |
| | | VCKNYAEAKDVFLGMFLYEYARRHPDYSVVLLLRLAKTYETTLEKCCAAAD |
| | | PHECYAKVFDEFKPLVEEPQNLIKQNCELFEQLGEYKFQNALLVRYTKKVPQV |
| | | STPTLVEVSRNLGKVGSKCCKHPEAKRMPCAEDYLSVVLNQLCVLHEKTPVS |
| | | DRVTKCCTESLVNRRPCFSALEVDETYVPKEFNAETFTFHADICTLSEKERQIK |
| | | KQTALVELVKHKPKATKEQLKAVMDDFAAFVEKCCKADDKETCFAEEGKKL |
| | | VAASQAALGLSGGPALFKSSFPPGSCDLPQTHSLGNRRALILLAQMRRISPFSC |
| | | LKDRHDFEFPQEEFDDKQFQKAQAISVLHEMIQQTFNLFSTKDSSAALDETLL |
| | | DEFYIELDQQLNDLESCVMQEVGVIESPLMYEDSILAVRKYFQRITLYLTEKKY |
| | | SSCAWEVVRAEIMRSFSLSINLQKRLKSKESGGPALFKSSFPPGSDAHKSEVAH |
| | | RFKDLGEENFKALVLIAFAQYLQQCPFEDHVKLVNEVTEFAKTCVADESAEN |
| | | CDKSLHTLFGDKLCTVATLRETYGEMADCCAKQEPERNECFLQHKDDNPNLP |
| | | RLVRPEVDVMCTAFHDNEETFLKKYLYEIARRHPYFYAPELLFFAKRYKAAFT |
| | | ECCQAADKAACLLPKLDELRDEGKASSAKQRLKCASLQKFGERAFKAWAVA |
| | | RLSQRFPKAEFAEVSKLVTDLTKVHTECCHGDLLECADDRADLAKYICENQD |
| | | SISSKLKECCEKPLLEKSHCIAEVENDEMPADLPSLAADFVESKDVCKNYAEA |
| | | KDVFLGMFLYEYARRHPDYSVVLLLRLAKTYETTLEKCCAAADPHECYAKVF |
| | | DEFKPLVEEPQNLIKQNCELFEQLGEYKFQNALLVRYTKKVPQVSTPTLVEVS |
| | | RNLGKVGSKCCKHPEAKRMPCAEDYLSVVLNQLCVLHEKTPVSDRVTKCCTE |
| | | SLVNRRPCFSALEVDETYVPKEFNAETFTFHADICTLSEKERQIKKQTALVELV |
| | | KHKPKATKEQLKAVMDDFAAFVEKCCKADDKETCFAEEGKKLVAASQAALG |
| | | L |
| 560 | WW0832 | DAHKSEVAHRFKDLGEENFKALVLIAFAQYLQQCPFEDHVKLVNEVTEFAKT |
| | | CVADESAENCDKSLHTLFGDKLCTVATLRETYGEMADCCAKQEPERNECFLQ |
| | | HKDDNPNLPRLVRPEVDVMCTAFHDNEETFLKKYLYEIARRHPYFYAPELLFF |
| | | AKRYKAAFTECCQAADKAACLLPKLDELRDEGKASSAKQRLKCASLQKFGER |
| | | AFKAWAVARLSQRFPKAEFAEVSKLVTDLTKVHTECCHGDLLECADDRADL |
| | | AKYICENQDSISSKLKECCEKPLLEKSHCIAEVENDEMPADLPSLAADFVESKD |
| | | VCKNYAEAKDVFLGMFLYEYARRHPDYSVVLLLRLAKTYETTLEKCCAAAD |
| | | PHECYAKVFDEFKPLVEEPQNLIKQNCELFEQLGEYKFQNALLVRYTKKVPQV |
| | | STPTLVEVSRNLGKVGSKCCKHPEAKRMPCAEDYLSVVLNQLCVLHEKTPVS |
| | | DRVTKCCTESLVNRRPCFSALEVDETYVPKEFNAETFTFHADICTLSEKERQIK |
| | | KQTALVELVKHKPKATKEQLKAVMDDFAAFVEKCCKADDKETCFAEEGKKL |
| | | VAASQAALGLSGGPALFKSSFPPGSCDLPQTHSLGNRRALILLAQMGRISHFSC |
| | | LKDRYDFGFPQEVFDGNQFQKAQAISAFHEMIQQTFNLFSTKDSSAAWDETLL |
| | | DKFYIELFQQLNDLEACVTQEVGVEEIALMNEDSILAVRKYFQRITLYLMGKK |
| | | YSPCAWEVVRAEIMRSFSFSTNLQKGLRRKDSGGPALFKSSFPPGSDAHKSEV |
| | | AHRFKDLGEENFKALVLIAFAQYLQQCPFEDHVKLVNEVTEFAKTCVADESA |
| | | ENCDKSLHTLFGDKLCTVATLRETYGEMADCCAKQEPERNECFLQHKDDNPN |
| | | LPRLVRPEVDVMCTAFHDNEETFLKKYLYEIARRHPYFYAPELLFFAKRYKAA |
| | | FTECCQAADKAACLLPKLDELRDEGKASSAKQRLKCASLQKFGERAFKAWA |
| | | VARLSQRFPKAEFAEVSKLVTDLTKVHTECCHGDLLECADDRADLAKYICEN |
| | | QDSISSKLKECCEKPLLEKSHCIAEVENDEMPADLPSLAADFVESKDVCKNYA |
| | | EAKDVFLGMFLYEYARRHPDYSVVLLLRLAKTYETTLEKCCAAADPHECYAK |
| | | VFDEFKPLVEEPQNLIKQNCELFEQLGEYKFQNALLVRYTKKVPQVSTPTLVE |
| | | VSRNLGKVGSKCCKHPEAKRMPCAEDYLSVVLNQLCVLHEKTPVSDRVTKC |
| | | CTESLVNRRPCFSALEVDETYVPKEFNAETFTFHADICTLSEKERQIKKQTALV |
| | | ELVKHKPKATKEQLKAVMDDFAAFVEKCCKADDKETCFAEEGKKLVAASQA |
| | | ALGL |
| 561 | WW0833 | EVQLVESGGGLVQPGNSLRLSCAASGFTFSKFGMSWVRQAPGKGLEWVSSIS |
| | | GSGRDTLYAESVKGRFTISRDNAKTTLYLQMNSLRPEDTAVYYCTIGGSLSVS |
| | | SQGTLVTVSSSGGPALFKSSFPPGSCDLPQTHSLGNRRALILLAQMRRISPFSCL |
| | | KDRHDFEFPQEEFDDKQFQKAQAISVLHEMIQQTFNLFSTKDSSAALDETLLD |
| | | EFYIELDQQLNDLESCVMQEVGVIESPLMYEDSILAVRKYFQRITLYLTEKKYS |
| | | SCAWEVVRAEIMRSFSLSINLQKRLKSKESGGPALFKSSFPPGSEVQLVESGGG |
| | | LVQPGNSLRLSCAASGFTFSKFGMSWVRQAPGKGLEWVSSISGSGRDTLYAES |
| | | VKGRFTISRDNAKTTLYLQMNSLRPEDTAVYYCTIGGSLSVSSQGTLVTVSS |
| 562 | WW0834 | EVQLVESGGGLVQPGNSLRLSCAASGFTFSKFGMSWVRQAPGKGLEWVSSIS |
| | | GSGRDTLYAESVKGRFTISRDNAKTTLYLQMNSLRPEDTAVYYCTIGGSLSVS |
| | | SQGTLVTVSSSGGPALFKSSFPPGSCDLPQTHSLGNRRALILLAQMGRISHFSCL |
| | | KDRYDFGFPQEVFDGNQFQKAQAISAFHEMIQQTFNLFSTKDSSAAWDETLLD |
| | | KFYIELFQQLNDLEACVTQEVGVEEIALMNEDSILAVRKYFQRITLYLMGKKY |
| | | SPCAWEVVRAEIMRSFSFSTNLQKGLRRKDSGGPALFKSSFPPGSEVQLVESGG |
| | | GLVQPGNSLRLSCAASGFTFSKFGMSWVRQAPGKGLEWVSSISGSGRDTLYA |
| | | ESVKGRFTISRDNAKTTLYLQMNSLRPEDTAVYYCTIGGSLSVSSQGTLVTVSS |
| 563 | WW0737 | EVQLVESGGGLVQPGNSLRLSCAASGFTFSKFGMSWVRQAPGKGLEWVSSIS |
| | | GSGRDTLYAESVKGRFTISRDNAKTTLYLQMNSLRPEDTAVYYCTIGGSLSVS |
| | | SQGTLVTVSSSGGPGPAGLYAQPGSINYKQLQLQERTNIRKCQELLEQLNGKIN |
| | | LTYRADFKIPMEMTEKMQKSYTAFAIQEMLQNVFLVFRNNFSSTGWNETIVV |
| | | RLLDELHQQTVFLKTVLEEKQEERLTWEMSSTALHLKSYYWRVQRYLKLMK |
| | | YNSYAWMVVRAEIFRNFLIIRRLTRNFQNSGGPGPAGLYAQPGSEVQLVESGG |
| | | GLVQPGNSLRLSCAASGFTFSKFGMSWVRQAPGKGLEWVSSISGSGRDTLYA |
| | | ESVKGRFTISRDNAKTTLYLQMNSLRPEDTAVYYCTIGGSLSVSSQGTLVTVSS |
| 564 | WW0738 | EVQLVESGGGLVQPGNSLRLSCAASGFTFSKFGMSWVRQAPGKGLEWVSSIS |
| | | GSGRDTLYAESVKGRFTISRDNAKTTLYLQMNSLRPEDTAVYYCTIGGSLSVS |
| | | SQGTLVTVSSSGGPALFKSSFPPGSINYKQLQLQERTNIRKCQELLEQLNGKINL |
| | | TYRADFKIPMEMTEKMQKSYTAFAIQEMLQNVFLVFRNNFSSTGWNETIVVR |
| | | LLDELHQQTVFLKTVLEEKQEERLTWEMSSTALHLKSYYWRVQRYLKLMKY |
| | | NSYAWMVVRAEIFRNFLIIRRLTRNFQNSGGPALFKSSFPPGSEVQLVESGGGL |
| | | VQPGNSLRLSCAASGFTFSKFGMSWVRQAPGKGLEWVSSISGSGRDTLYAESV |
| | | KGRFTISRDNAKTTLYLQMNSLRPEDTAVYYCTIGGSLSVSSQGTLVTVSS |
| 565 | WW0739 | EVQLVESGGGLVQPGNSLRLSCAASGFTFSKFGMSWVRQAPGKGLEWVSSIS |
| | | GSGRDTLYAESVKGRFTISRDNAKTTLYLQMNSLRPEDTAVYYCTIGGSLSVS |
| | | SQGTLVTVSSSGGPGPAGLYAQPGSINYKQLQLQERTNIRKSQELLEQLNGKIN |
| | | LTYRADFKIPMEMTEKMQKSYTAFAIQEMLQNVFLVFRNNFSSTGWNETIVV |
| | | RLLDELHQQTVFLKTVLEEKQEERLTWEMSSTALHLKSYYWRVQRYLKLMK |
| | | YNSYAWMVVRAEIFRNFLIIRRLTRNFQNSGGPGPAGLYAQPGSEVQLVESGG |
| | | GLVQPGNSLRLSCAASGFTFSKFGMSWVRQAPGKGLEWVSSISGSGRDTLYA |
| | | ESVKGRFTISRDNAKTTLYLQMNSLRPEDTAVYYCTIGGSLSVSSQGTLVTVSS |
| 566 | WW0740 | EVQLVESGGGLVQPGNSLRLSCAASGFTFSKFGMSWVRQAPGKGLEWVSSIS |
| | | GSGRDTLYAESVKGRFTISRDNAKTTLYLQMNSLRPEDTAVYYCTIGGSLSVS |
| | | SQGTLVTVSSSGGPALFKSSFPPGSINYKQLQLQERTNIRKSQELLEQLNGKINL |
| | | TYRADFKIPMEMTEKMQKSYTAFAIQEMLQNVFLVFRNNFSSTGWNETIVVR |
| | | LLDELHQQTVFLKTVLEEKQEERLTWEMSSTALHLKSYYWRVQRYLKLMKY |
| | | NSYAWMVVRAEIFRNFLIIRRLTRNFQNSGGPALFKSSFPPGSEVQLVESGGGL |
| | | VQPGNSLRLSCAASGFTFSKFGMSWVRQAPGKGLEWVSSISGSGRDTLYAESV |
| | | KGRFTISRDNAKTTLYLQMNSLRPEDTAVYYCTIGGSLSVSSQGTLVTVSS |
| 567 | WW0741 | EVQLVESGGGLVQPGNSLRLSCAASGFTFSKFGMSWVRQAPGKGLEWVSSIS |
| | | GSGRDTLYAESVKGRFTISRDNAKTTLYLQMNSLRPEDTAVYYCTIGGSLSVS |
| | | SQGTLVTVSSSGGPGPAGLYAQPGSMSYNLLGFLQRSSNFQCQKLLWQLNGR |
| | | LEYCLKDRMNFDIPEEIKQLQQFQKEDAALTIYEMLQNIFAIFRQDSSSTGWNE |
| | | TIVENLLANVYHQINHLKTVLEEKLEKEDFTRGKLMSSLHLKRYYGRILHYLK |
| | | AKEYSHCAWTIVRVEILRNFYFINRLTGYLRNSGGPGPAGLYAQPGSEVQLVE |
| | | SGGGLVQPGNSLRLSCAASGFTFSKFGMSWVRQAPGKGLEWVSSISGSGRDTL |
| | | YAESVKGRFTISRDNAKTTLYLQMNSLRPEDTAVYYCTIGGSLSVSSQGTLVT |
| | | VSS |
| 568 | WW0742 | EVQLVESGGGLVQPGNSLRLSCAASGFTFSKFGMSWVRQAPGKGLEWVSSIS |
| | | GSGRDTLYAESVKGRFTISRDNAKTTLYLQMNSLRPEDTAVYYCTIGGSLSVS |
| | | SQGTLVTVSSSGGPALFKSSFPPGSMSYNLLGFLQRSSNFQCQKLLWQLNGRL |
| | | EYCLKDRMNFDIPEEIKQLQQFQKEDAALTIYEMLQNIFAIFRQDSSSTGWNET |
| | | IVENLLANVYHQINHLKTVLEEKLEKEDFTRGKLMSSLHLKRYYGRILHYLKA |
| | | KEYSHCAWTIVRVEILRNFYFINRLTGYLRNSGGPALFKSSFPPGSEVQLVESG |
| | | GGLVQPGNSLRLSCAASGFTFSKFGMSWVRQAPGKGLEWVSSISGSGRDTLY |
| | | AESVKGRFTISRDNAKTTLYLQMNSLRPEDTAVYYCTIGGSLSVSSQGTLVTV |
| | | SS |
| 569 | WW0743 | EVQLVESGGGLVQPGNSLRLSCAASGFTFSKFGMSWVRQAPGKGLEWVSSIS |
| | | GSGRDTLYAESVKGRFTISRDNAKTTLYLQMNSLRPEDTAVYYCTIGGSLSVS |
| | | SQGTLVTVSSSGGPGPAGLYAQPGSMSYNLLGFLQRSSNFQSQKLLWQLNGR |
| | | LEYCLKDRMNFDIPEEIKQLQQFQKEDAALTIYEMLQNIFAIFRQDSSSTGWNE |
| | | TIVENLLANVYHQINHLKTVLEEKLEKEDFTRGKLMSSLHLKRYYGRILHYLK |
| | | AKEYSHCAWTIVRVEILRNFYFINRLTGYLRNSGGPGPAGLYAQPGSEVQLVE |
| | | SGGGLVQPGNSLRLSCAASGFTFSKFGMSWVRQAPGKGLEWVSSISGSGRDTL |
| | | YAESVKGRFTISRDNAKTTLYLQMNSLRPEDTAVYYCTIGGSLSVSSQGTLVT |
| | | VSS |
| 570 | WW0744 | EVQLVESGGGLVQPGNSLRLSCAASGFTFSKFGMSWVRQAPGKGLEWVSSIS |
| | | GSGRDTLYAESVKGRFTISRDNAKTTLYLQMNSLRPEDTAVYYCTIGGSLSVS |
| | | SQGTLVTVSSSGGPALFKSSFPPGSMSYNLLGFLQRSSNFQSQKLLWQLNGRL |
| | | EYCLKDRMNFDIPEEIKQLQQFQKEDAALTIYEMLQNIFAIFRQDSSSTGWNET |
| | | IVENLLANVYHQINHLKTVLEEKLEKEDFTRGKLMSSLHLKRYYGRILHYLKA |
| | | KEYSHCAWTIVRVEILRNFYFINRLTGYLRNSGGPALFKSSFPPGSEVQLVESG |
| | | GGLVQPGNSLRLSCAASGFTFSKFGMSWVRQAPGKGLEWVSSISGSGRDTLY |
| | | AESVKGRFTISRDNAKTTLYLQMNSLRPEDTAVYYCTIGGSLSVSSQGTLVTV |
| | | SS |
| 571 | WW0745 | INYKQLQLQERTNIRKCQELLEQLNGKINLTYRADFKIPMEMTEKMQKSYTAF |
| | | AIQEMLQNVFLVFRNNFSSTGWNETIVVRLLDELHQQTVFLKTVLEEKQEERL |
| | | TWEMSSTALHLKSYYWRVQRYLKLMKYNSYAWMVVRAEIFRNFLIIRRLTR |
| | | NFQNHHHHHH |
| 572 | WW0746 | INYKQLQLQERTNIRKSQELLEQLNGKINLTYRADFKIPMEMTEKMQKSYTAF |
| | | AIQEMLQNVFLVFRNNFSSTGWNETIVVRLLDELHQQTVFLKTVLEEKQEERL |
| | | TWEMSSTALHLKSYYWRVQRYLKLMKYNSYAWMVVRAEIFRNFLIIRRLTR |
| | | NFQNHHHHHH |
| 573 | WW0747 | MSYNLLGFLQRSSNFQCQKLLWQLNGRLEYCLKDRMNFDIPEEIKQLQQFQK |
| | | EDAALTIYEMLQNIFAIFRQDSSSTGWNETIVENLLANVYHQINHLKTVLEEKL |
| | | EKEDFTRGKLMSSLHLKRYYGRILHYLKAKEYSHCAWTIVRVEILRNFYFINR |
| | | LTGYLRNHHHHHH |
| 574 | WW0748 | MSYNLLGFLQRSSNFQSQKLLWQLNGRLEYCLKDRMNFDIPEEIKQLQQFQKE |
| | | DAALTIYEMLQNIFAIFRQDSSSTGWNETTVENLLANVYHQINHLKTVLEEKLE |
| | | KEDFTRGKLMSSLHLKRYYGRILHYLKAKEYSHCAWTIVRVEILRNFYFINRL |
| | | TGYLRNHHHHHH |
| 575 | WW0787 | EVQLVESGGGLVQPGNSLRLSCAASGFTFSKFGMSWVRQAPGKGLEWVSSIS |
| | | GSGRDTLYAESVKGRFTISRDNAKTTLYLQMNSLRPEDTAVYYCTIGGSLSVS |
| | | SQGTLVTVSSSGGPGPAGLYAQPGSMSYNLLGFLQRSSNFQCQKLLWQLNGR |
| | | LEYCLKDRMNFDIPEEIKQLQQFQKEDAALTIYEMLQNIFAIFRQDSSSTGWQE |
| | | TIVENLLANVYHQINHLKTVLEEKLEKEDFTRGKLMSSLHLKRYYGRILHYLK |
| | | AKEYSHCAWTIVRVEILRNFYFINRLTGYLRNSGGPGPAGLYAQPGSEVQLVE |
| | | SGGGLVQPGNSLRLSCAASGFTFSKFGMSWVRQAPGKGLEWVSSISGSGRDTL |
| | | YAESVKGRFTISRDNAKTTLYLQMNSLRPEDTAVYYCTIGGSLSVSSQGTLVT |
| | | VSS |
| 576 | WW0788 | EVQLVESGGGLVQPGNSLRLSCAASGFTFSKFGMSWVRQAPGKGLEWVSSIS |
| | | GSGRDTLYAESVKGRFTISRDNAKTTLYLQMNSLRPEDTAVYYCTIGGSLSVS |
| | | SQGTLVTVSSSGGPGPAGLYAQPGSMSYNLLGFLQRSSNFQSQKLLWQLNGR |
| | | LEYCLKDRMNFDIPEEIKQLQQFQKEDAALTIYEMLQNIFAIFRQDSSSTGWQE |
| | | TIVENLLANVYHQINHLKTVLEEKLEKEDFTRGKLMSSLHLKRYYGRILHYLK |
| | | AKEYSHCAWTIVRVEILRNFYFINRLTGYLRNSGGPGPAGLYAQPGSEVQLVE |
| | | SGGGLVQPGNSLRLSCAASGFTFSKFGMSWVRQAPGKGLEWVSSISGSGRDTL |
| | | YAESVKGRFTISRDNAKTTLYLQMNSLRPEDTAVYYCTIGGSLSVSSQGTLVT |
| | | VSS |
| 577 | WW0789 | MSYNLLGFLQRSSNFQCQKLLWQLNGRLEYCLKDRMNFDIPEEIKQLQQFQK |
| | | EDAALTIYEMLQNIFAIFRQDSSSTGWQETIVENLLANVYHQINHLKTVLEEKL |
| | | EKEDFTRGKLMSSLHLKRYYGRILHYLKAKEYSHCAWTIVRVEILRNFYFINR |
| | | LTGYLRNHHHHHH |
| 578 | WW0790 | MSYNLLGFLQRSSNFQSQKLLWQLNGRLEYCLKDRMNFDIPEEIKQLQQFQKE |
| | | DAALTIYEMLQNIFAIFRQDSSSTGWQETIVENLLANVYHQINHLKTVLEEKLE |
| | | KEDFTRGKLMSSLHLKRYYGRILHYLKAKEYSHCAWTIVRVEILRNFYFINRL |
| | | TGYLRNHHHHHH |
| 579 | WW0729 | APTSSSTKKTQLQLEHLLLDLQMILNGINNYKNPKLTRMLTFKFYMPKKATEL |
| | | KHLQCLEEELKPLEEVLNLAQSKNFHLRPRDLISNINVIVLELKGSETTFMCEY |
| | | ADETATIVEFLNRWITFCQSIISTLTSGGPGGGGSGGGPGSEVQLVESGGGLVQ |
| | | PGNSLRLSCAASGFTFSKFGMSWVRQAPGKGLEWVSSISGSGRDTLYAESVKG |
| | | RFTISRDNAKTTLYLQMNSLRPEDTAVYYCTIGGSLSVSSQGTLVTVSSGGGGS |
| | | GGGGSGGGGSGGGGSGGGGSGGGGSSGGPGGGGSGGGPGSEVQLVESGGGL |
| | | VQPGGSLRLSCAASGFTFSSYTLAWVRQAPGKGLEWVAAIDSSSYTYSPDTVR |
| | | GRFTISRDNAKNSLYLQMNSLRAEDTAVYYCARDSNWDALDYWGQGTTVTV |
| | | SSASTKGPSVFPLAPSSKSTSGGTAALGCLVKDYFPEPVTVSWNSGALTSGVH |
| | | TFPAVLQSSGLYSLSSVVTVPSSSLGTQTYICNVNHKPSNTKVDKRVEPKSC |
| 580 | WW0734 | APTSSSTKKTQLQLEHLLLDLQMILNGINNYKNPKLTRMLTFKFYMPKKATEL |
| | | KHLQCLEEELKPLEEVLNLAQSKNFHLRPRDLISNINVIVLELKGSETTFMCEY |
| | | ADETATIVEFLNRWITFCQSIISTLTSGGPGPAGMKGLPGSEVQLVESGGGLVQ |
| | | PGNSLRLSCAASGFTFSKFGMSWVRQAPGKGLEWVSSISGSGRDTLYAESVKG |
| | | RFTISRDNAKTTLYLQMNSLRPEDTAVYYCTIGGSLSVSSQGTLVTVSSGGGGS |
| | | GGGGSGGGGSGGGGSGGGGSGGGGSGGGGSGGGGSGGGGSEVQLVESGGGL |
| | | VQPGGSLRLSCAASGFTFSSYTLAWVRQAPGKGLEWVAAIDSSSYTYSPDTVR |
| | | GRFTISRDNAKNSLYLQMNSLRAEDTAVYYCARDSNWDALDYWGQGTTVTV |
| | | SSASTKGPSVFPLAPSSKSTSGGTAALGCLVKDYFPEPVTVSWNSGALTSGVH |
| | | TFPAVLQSSGLYSLSSVVTVPSSSLGTQTYICNVNHKPSNTKVDKRVEPKSC |
| 581 | WW0735 | APTSSSTKKTQLQLEHLLLDLQMILNGINNYKNPKLTRMLTFKFYMPKKATEL |
| | | KHLQCLEEELKPLEEVLNLAQSKNFHLRPRDLISNINVIVLELKGSETTFMCEY |
| | | ADETATIVEFLNRWITFCQSIISTLTSGGPGPAGLYAQPGSEVQLVESGGGLVQP |
| | | GNSLRLSCAASGFTFSKFGMSWVRQAPGKGLEWVSSISGSGRDTLYAESVKG |
| | | RFTISRDNAKTTLYLQMNSLRPEDTAVYYCTIGGSLSVSSQGTLVTVSSGGGGS |
| | | GGGGSGGGGSGGGGSGGGGSGGGGSGGGGSGGGGSGGGGSEVQLVESGGGL |
| | | VQPGGSLRLSCAASGFTFSSYTLAWVRQAPGKGLEWVAAIDSSSYTYSPDTVR |
| | | GRFTISRDNAKNSLYLQMNSLRAEDTAVYYCARDSNWDALDYWGQGTTVTV |
| | | SSASTKGPSVFPLAPSSKSTSGGTAALGCLVKDYFPEPVTVSWNSGALTSGVH |
| | | TFPAVLQSSGLYSLSSVVTVPSSSLGTQTYICNVNHKPSNTKVDKRVEPKSC |
| 582 | WW0736 | APTSSSTKKTQLQLEHLLLDLQMILNGINNYKNPKLTRMLTFKFYMPKKATEL |
| | | KHLQCLEEELKPLEEVLNLAQSKNFHLRPRDLISNINVIVLELKGSETTFMCEY |
| | | ADETATIVEFLNRWITFCQSIISTLTSGGPALFKSSFPPGSEVQLVESGGGLVQP |
| | | GNSLRLSCAASGFTFSKFGMSWVRQAPGKGLEWVSSISGSGRDTLYAESVKG |
| | | RFTISRDNAKTTLYLQMNSLRPEDTAVYYCTIGGSLSVSSQGTLVTVSSGGGGS |
| | | GGGGSGGGGSGGGGSGGGGSGGGGSGGGGSGGGGSGGGGSEVQLVESGGGL |
| | | VQPGGSLRLSCAASGFTFSSYTLAWVRQAPGKGLEWVAAIDSSSYTYSPDTVR |
| | | GRFTISRDNAKNSLYLQMNSLRAEDTAVYYCARDSNWDALDYWGQGTTVTV |
| | | SSASTKGPSVFPLAPSSKSTSGGTAALGCLVKDYFPEPVTVSWNSGALTSGVH |
| | | TFPAVLQSSGLYSLSSVVTVPSSSLGTQTYICNVNHKPSNTKVDKRVEPKSC |
| 583 | WW0792 | EVQLVESGGGLVQPGGSLRLSCAASGFTFSSYTLAWVRQAPGKGLEWVAAID |
| | | SSSYTYSPDTVRGRFTISRDNAKNSLYLQMNSLRAEDTAVYYCARDSNWDAL |
| | | DYWGQGTTVTVSSASTKGPSVFPLAPSSKSTSGGTAALGCLVKDYFPEPVTVS |
| | | WNSGALTSGVHTFPAVLQSSGLYSLSSVVTVPSSSLGTQTYICNVNHKPSNTK |
| | | VDKRVEPKSCHHHHHH |
| 584 | WW0061 | APTSSSTKKTQLQLEHLLLDLQMILNGINNYKNPKLTRMLTFKFYMPKKATEL |
| | | KHLQCLEEELKPLEEVLNLAQSKNFHLRPRDLISNINVIVLELKGSETTFMCEY |
| | | ADETATIVEFLNRWITFCQSIISTLTSGGPGPAGMKGLPGSEVQLVESGGGLVQ |
| | | PGNSLRLSCAASGFTFSKFGMSWVRQAPGKGLEWVSSISGSGRDTLYAESVKG |
| | | RFTISRDNAKTTLYLQMNSLRPEDTAVYYCTIGGSLSVSSQGTLVTVSSHHHH |
| | | HH |
| 585 | ACP293 | QVQLQESGGGLVQTGGSLRLSCTTSGTIFSGYTMGWYRQAPGEQRELVAVISG |
| | (WW0237) | GGDTNYADSVKGRFTISRDNTKDTMYLQMNSLKPEDTAVYYCYSREVTPPW |
| | | KLYWGQGTQVTVSSAAAYPYDVPDYGSHHHHHH |
| 586 | ACP294 | QVQLQESGGGLVQEGGSLRLSCAASERIFSTDVMGWYRQAAEKQRELVAVVS |
| | (WW0238) | ARGTTNYLDAVKGRFTISRDNARNTLTLQMNDLKPEDTASYYCYVRETTSPW |
| | | RIYWGQGTQVTVSSAAAYPYDVPDYGSHHHHHH |
| 587 | ACP295 | QVQLQESGGGLVQAGGSLRLSCAASGSIFSANAMGWYRQAPGKQRELVAVIS |
| | (WW0239) | SGGSTNYADSVKGRFTISRDNAKNTVYLQMNSLKPEDTAVYYCMYSGSYYY |
| | | TPNDYWGQGTQVTVSSAAAYPYDVPDYGSHHHHHH |
| 588 | ACP315 | EVQLLESGGGLVQPGGSLRLSCAASGSIFSANAMGWYRQAPGKQRELVAVISS |
| | (WW0368) | GGSTNYADSVKGRFTISRDNSKNTVYLQMNSLRAEDTAVYYCMYSGSYYYTP |
| | | NDYWGQGTLVTVSSAAAYPYDVPDYGSHHHHHH |
| 589 | ACP316 | EVQLLESGGGLVQPGGSLRLSCAASGSIFSANAMGWYRQAPGKGLELVAVISS |
| | (WW0369) | GGSTNYADSVKGRFTISRDNSKNTVYLQMNSLRAEDTAVYYCMYSGSYYYTP |
| | | NDYWGQGTLVTVSSAAAYPYDVPDYGSHHHHHH |
| 590 | ACP317 | EVQLLESGGGLVQPGGSLRLSCAASGSIFSANAMGWVRQAPGKGLEWVSVIS |
| | (WW0370) | SGGSTNYADSVKGRFTISRDNSKNTLYLQMNSLRAEDTAVYYCMYSGSYYYT |
| | | PNDYWGQGTLVTVSSAAAYPYDVPDYGSHHHHHH |
| 591 | ACP318 | QVQLLESGGGLVQPGGSLRLSCAASGSIFSANAMGWYRQAPGKQRELVAVIS |
| | (WW0371) | SGGSTNYADSVKGRFTISRDNSKNTVYLQMNSLRAEDTAVYYCMYSGSYYYT |
| | | PNDYWGQGTLVTVSSAAAYPYDVPDYGSHHHHHH |
| 592 | ACP319 | EVQLLESGGGLVQPGGSLRLSCAASGSIFSANAMGWYRQAPGKGRELVAVISS |
| | (WW0372) | GGSTNYADSVKGRFTISRDNSKNTVYLQMNSLRAEDTAVYYCMYSGSYYYTP |
| | | NDYWGQGTLVTVSSAAAYPYDVPDYGSHHHHHH |
| 593 | ACP320 | QVQLLESGGGLVQAGGSLRLSCAASGSIFSANAMGWYRQAPGKQRELVAVIS |
| | (WW0373) | SGGSTNYADSVKGRFTISRDNSKNTVYLQMNSLRAEDTAVYYCMYSGSYYYT |
| | | PNDYWGQGTLVTVSSAAAYPYDVPDYGSHHHHHH |
| 594 | ACP321 | EVQLLESGGGLVQPGGSLRLSCAASERIFSTDVMGWYRQAPGKQRELVAVVS |
| | (WW0374) | ARGTTNYLDAVKGRFTISRDNSKNTLYLQMNSLRAEDTAVYYCYVRETTSPW |
| | | RIYWGQGTLVTVSSAAAYPYDVPDYGSHHHHHH |
| 595 | ACP322 | EVQLLESGGGLVQPGGSLRLSCAASERIFSTDVMGWYRQAPGKGLELVAVVS |
| | (WW0375) | ARGTTNYLDAVKGRFTISRDNSKNTLYLQMNSLRAEDTAVYYCYVRETTSPW |
| | | RIYWGQGTLVTVSSAAAYPYDVPDYGSHHHHHH |
| 596 | ACP323 | EVQLLESGGGLVQPGGSLRLSCAASERIFSTDVMGWVRQAPGKGLEWVSVVS |
| | (WW0376) | ARGTTNYLDAVKGRFTISRDNSKNTLYLQMNSLRAEDTAVYYCYVRETTSPW |
| | | RIYWGQGTLVTVSSAAAYPYDVPDYGSHHHHHH |
| 597 | ACP324 | QVQLLESGGGLVQPGGSLRLSCAASERIFSTDVMGWYRQAPGKQRELVAVVS |
| | (WW0377) | ARGTTNYLDAVKGRFTISRDNSKNTLYLQMNSLRAEDTAVYYCYVRETTSPW |
| | | RIYWGQGTLVTVSSAAAYPYDVPDYGSHHHHHH |
| 598 | ACP325 | EVQLLESGGGLVQPGGSLRLSCAASERIFSTDVMGWYRQAPGKGRELVAVVS |
| | (WW0378) | ARGTTNYLDSVKGRFTISRDNSKNTLYLQMNSLRAEDTAVYYCYVRETTSPW |
| | | RIYWGQGTLVTVSSAAAYPYDVPDYGSHHHHHH |
| 599 | ACP326 | QVQLLESGGGLVQEGGSLRLSCAASERIFSTDVMGWYRQAAGKQRELVAVVS |
| | (WW0379) | ARGTTNYLDAVKGRFTISRDNSKNTLYLQMNSLRAEDTASYYCYVRETTSPW |
| | | RIYWGQGTLVTVSSAAAYPYDVPDYGSHHHHHH |
| 600 | ACP327 | EVQLLESGGGLVQPGGSLRLSCAASERIFSTDVMGWYRQAPGKGLELVAVVS |
| | (WW0380) | ARGTTNYLDSVKGRFTISRDNSKNTLYLQMNSLRAEDTAVYYCYVRETTSPW |
| | | RIYWGQGTLVTVSSAAAYPYDVPDYGSHHHHHH |
| 601 | ACP328 | EVQLLESGGGLVQPGGSLRLSCATSGTIFSGYTMGWYRQAPGKQRELVAVISG |
| | (WW0381) | GGDTNYADSVKGRFTISRDNSKDTMYLQMNSLRAEDTAVYYCYSREVTPPW |
| | | KLYWGQGTLVTVSSAAAYPYDVPDYGSHHHHHH |
| 602 | ACP329 | EVQLLESGGGLVQPGGSLRLSCATSGTIFSGYTMGWYRQAPGKGLELVAVISG |
| | (WW0382) | GGDTNYADSVKGRFTISRDNSKDTMYLQMNSLRAEDTAVYYCYSREVTPPW |
| | | KLYWGQGTLVTVSSAAAYPYDVPDYGSHHHHHH |
| 603 | ACP330 | EVQLLESGGGLVQPGGSLRLSCAASGTIFSGYTMGWVRQAPGKGLEWVSVIS |
| | (WW0383) | GGGDTNYADSVKGRFTISRDNSKNTLYLQMNSLRAEDTAVYYCYSREVTPPW |
| | | KLYWGQGTLVTVSSAAAYPYDVPDYGSHHHHHH |
| 604 | ACP331 | QVQLLESGGGLVQPGGSLRLSCATSGTIFSGYTMGWYRQAPGKQRELVAVIS |
| | (WW0384) | GGGDTNYADSVKGRFTISRDNSKDTMYLQMNSLRAEDTAVYYCYSREVTPP |
| | | WKLYWGQGTLVTVSSAAAYPYDVPDYGSHHHHHH |
| 605 | ACP332 | EVQLLESGGGLVQPGGSLRLSCATSGTIFSGYTMGWYRQAPGKQRELVAVISG |
| | (WW0385) | GGDTNYADSVKGRFTISRDNSKNTMYLQMNSLRAEDTAVYYCYSREVTPPW |
| | | KLYWGQGTLVTVSSAAAYPYDVPDYGSHHHHHH |
| 606 | ACP333 | EVQLLESGGGLVQPGGSLRLSCATSGTIFSGYTMGWYRQAPGKGRELVAVISG |
| | (WW0386) | GGDTNYADSVKGRFTISRDNSKNTMYLQMNSLRAEDTAVYYCYSREVTPPW |
| | | KLYWGQGTLVTVSSAAAYPYDVPDYGSHHHHHH |
| 607 | ACP334 | QVQLLESGGGLVQTGGSLRLSCATSGTIFSGYTMGWYRQAPGKQRELVAVIS |
| | (WW0387) | GGGDTNYADSVKGRFTISRDNSKDTMYLQMNSLRAEDTAVYYCYSREVTPP |
| | | WKLYWGQGTLVTVSSAAAYPYDVPDYGSHHHHHH |
| 608 | ACP335 | EVQLLESGGGLVQPGGSLRLSCATSGTIFSGYTMGWYRQAPGKGLELVAVISG |
| | (WW0388 | GGDTNYADSVKGRFTISRDNSKNTMYLQMNSLRAEDTAVYYCYSREVTPPW |
| | | KLYWGQGTLVTVSSAAAYPYDVPDYGSHHHHHH |
| 609 | MMP14_1 | GPAGLYAQ |
| 610 | MMP9_1 | GPAGMKGL |
| 611 | FAPa_1 | PGGPAGIG |
| 612 | CTSL1_1 | ALFKSSFP |
| 613 | CTSL1_2 | ALFFSSPP |
| 614 | ADAM17_ | LAQRLRSS |
| | 1 | |
| 615 | ADAM17_ | LAQKLKSS |
| | 2 | |
| 616 | ALU30-1 | GALFKSSFPSGGGPAGLYAQGGSGKGGSGK |
| 617 | ALU30-2 | RGSGGGPAGLYAQGSGGGPAGLYAQGGSGK |
| 618 | ALU30-3 | KGGGPAGLYAQGPAGLYAQGPAGLYAQGSR |
| 619 | ALU30-4 | RGGPAGLYAQGGPAGLYAQGGGPAGLYAQK |
| 620 | ALU30-5 | KGGALFKSSFPGGPAGIGPLAQKLKSSGGS |
| 621 | ALU30-6 | SGGPGGPAGIGALFKSSFPLAQKLKSSGGG |
| 622 | ALU30-7 | RGPLAQKLKSSALFKSSFPGGPAGIGGGGK |
| 623 | ALU30-8 | GGGALFKSSFPLAQKLKSSPGGPAGIGGGR |
| 624 | ALU30-9 | RGPGGPAGIGPLAQKLKSSALFKSSFPGGG |
| 625 | ALU30-10 | RGGPLAQKLKSSPGGPAGIGALFKSSFPGK |
| 626 | ALU30-11 | RSGGPAGLYAQALFKSSFPLAQKLKSSGGG |
| 627 | ALU30-12 | GGPLAQKLKSSALFKSSFPGPAGLYAQGGR |
| 628 | ALU30-13 | GGALFKSSFPGPAGLYAQPLAQKLKSSGGK |
| 629 | ALU30-14 | RGGALFKSSFPLAQKLKSSGPAGLYAQGGK |
| 630 | ALU30-15 | RGGGPAGLYAQPLAQKLKSSALFKSSFPGG |
| 631 | ALU30-16 | SGPLAQKLKSSGPAGLYAQALFKSSFPGSK |
| 632 | ALU30-17 | KGGPGGPAGIGPLAQRLRSSALFKSSFPGR |
| 633 | ALU30-18 | KSGPGGPAGIGALFFSSPPLAQKLKSSGGR |
| 634 | ALU30-19 | SGGFPRSGGSFNPRTFGSKRKRRGSRGGGG |

### INCORPORATION BY REFERENCE

[0378] The entire disclosures of all patent and non-patent publications cited herein are each incorporated by reference in their entireties for all purposes.

### Other Embodiments

[0379] The disclosure set forth above may encompass multiple distinct inventions with independent utility. Although each of these inventions has been disclosed in its preferred form(s), the specific embodiments thereof as disclosed and illustrated herein are not to be considered in a limiting sense, because numerous variations are possible. The subject matter of the inventions includes all novel and nonobvious combinations and subcombinations of the various elements, features, functions, and/or properties disclosed herein. The following claims particularly point out certain combinations and subcombinations regarded as novel and nonobvious. Inventions embodied in other combinations and subcombinations of features, functions, elements, and/or properties may be claimed in this application, in applications claiming priority from this application, or in related applications. Such claims, whether directed to a different invention or to the same invention, and whether broader, narrower, equal, or different in scope in comparison to the original claims, also are regarded as included within the subject matter of the inventions of the present disclosure.

The application's sequence listing, which the Patent Office published only in electronic form, follows.

SEQUENCE LISTING (647 sequences)

SEQ ID NO: 1 - protein, 153 aa, Homo sapiens
MYRMQLLSCIALSLALVTNSAPTSSSTKKTQLQLEHLLLDLQMILNGINNYKNPKLTRMLTFKFYMPKKATELKHLQCLEEELKPLEEVLNLAQSKNFHLRPRDLISNINVIVLELKGSETTFMCEYADETATIVEFLNRWITFCQSIISTLT

SEQ ID NO: 2 - protein, 609 aa, Homo sapiens [sequence omitted]

SEQ ID NO: 3 - protein, 8 aa, Unknown
  source: /note="Description of Unknown: MMP7 cleavage domain sequence"
KRALGLPG

SEQ ID NO: 4 - protein, 40 aa, Unknown
  source: /note="Description of Unknown: MMP7 cleavage domain sequence"
DEDEDEDEDEDEDEDERPLALWRSDRDRDRDRDRDRDRDR

SEQ ID NO: 5 - protein, 5 aa, Unknown
  source: /note="Description of Unknown: MMP9 cleavage domain sequence"
  VARIANT (3)..(3): /replace="Thr"
  VARIANT (4)..(4): /replace="Ile"
  VARIANT (5)..(5): /replace="Thr"
  SITE (1)..(5): /note="Variant residues given in the sequence have no preference with respect to those in the annotations for variant positions"
PRSLS

SEQ ID NO: 6 - protein, 5 aa, Unknown
  source: /note="Description of Unknown: MMP9 cleavage domain sequence"
LEATA

SEQ ID NO: 7 - protein, 10 aa, Unknown
  source: /note="Description of Unknown: MMP11 cleavage domain sequence"
GGAANLVRGG

SEQ ID NO: 8 - protein, 10 aa, Unknown
  source: /note="Description of Unknown: MMP14 cleavage domain sequence"
SGRIGFLRTA

SEQ ID NO: 9 - protein, 6 aa, Unknown
  source: /note="Description of Unknown: MMP cleavage domain sequence"
PLGLAG

SEQ ID NO: 10 - protein, 6 aa, Unknown
  source: /note="Description of Unknown: MMP cleavage domain sequence"
  MOD_RES (6)..(6): Any amino acid
PLGLAX

SEQ ID NO: 11 - protein, 6 aa, Unknown
  source: /note="Description of Unknown: MMP cleavage domain sequence"
  MOD_RES (4)..(4): Cys(me)
PLGXAG

SEQ ID NO: 12 - protein, 8 aa, Unknown
  source: /note="Description of Unknown: MMP cleavage domain sequence"
ESPAYYTA

SEQ ID NO: 13 - protein, 6 aa, Unknown
  source: /note="Description of Unknown: MMP cleavage domain sequence"
RLQLKL

SEQ ID NO: 14 - protein, 7 aa, Unknown
  source: /note="Description of Unknown: MMP cleavage domain sequence"
RLQLKAC

SEQ ID NO: 15 - protein, 7 aa, Unknown
  source: /note="Description of Unknown: MMP2, MMP9, MMP14 cleavage domain sequence"
  MOD_RES (3)..(3): Cit
  MOD_RES (5)..(5): Hof
EPXGXYL

SEQ ID NO: 16 - protein, 5 aa, Unknown
  source: /note="Description of Unknown: Urokinase plasminogen activator (uPA) cleavage domain" sequence
SGRSA

SEQ ID NO: 17 - protein, 4 aa, Unknown
  source: /note="Description of Unknown: Urokinase plasminogen activator (uPA) cleavage domain" sequence
DAFK

SEQ ID NO: 18 - protein, 5 aa, Unknown
  source: /note="Description of Unknown: Urokinase plasminogen activator (uPA) cleavage domain" sequence
GGGRR

SEQ ID NO: 19 - protein, 4 aa, Unknown
  source: /note="Description of Unknown: Lysosomal Enzyme cleavage domain sequence"
GFLG

SEQ ID NO: 20 - protein, 4 aa, Unknown
  source: /note="Description of Unknown: Lysosomal Enzyme cleavage domain sequence"
ALAL

SEQ ID NO: 21 - protein, 2 aa, Unknown
  source: /note="Description of Unknown: Lysosomal Enzyme cleavage domain sequence"
FK

SEQ ID NO: 22 - protein, 3 aa, Unknown
  source: /note="Description of Unknown: Cathepsin B cleavage domain sequence"
NLL

SEQ ID NO: 23 - protein, 5 aa, Unknown
  source: /note="Description of Unknown: Cathepsin D cleavage domain sequence"
  MOD_RES (3)..(3): Cys(Et)
PIXFF

SEQ ID NO: 24 - protein, 8 aa, Unknown
  source: /note="Description of Unknown: Cathepsin K cleavage domain sequence"
GGPRGLPG

SEQ ID NO: 25 - protein, 6 aa, Unknown
  source: /note="Description of Unknown: Prostate Specific Antigen cleavage domain sequence"
HSSKLQ

SEQ ID NO: 26 - protein, 7 aa, Unknown
  source: /note="Description of Unknown: Prostate Specific Antigen cleavage domain sequence"
HSSKLQL

SEQ ID NO: 27 - protein, 9 aa, Unknown
  source: /note="Description of Unknown: Prostate Specific Antigen cleavage domain sequence"
HSSKLQEDA

SEQ ID NO: 28 - protein, 10 aa, Unknown
  source: /note="Description of Unknown: Herpes Simplex Virus Protease cleavage domain" sequence
LVLASSSFGY

SEQ ID NO: 29 - protein, 10 aa, Unknown
  source: /note="Description of Unknown: HIV Protease cleavage domain sequence"
GVSQNYPIVG

SEQ ID NO: 30 - protein, 10 aa, Unknown
  source: /note="Description of Unknown: CMV Protease cleavage domain sequence"
GVVQASCRLA

SEQ ID NO: 31 - protein, 4 aa, Unknown
  source: /note="Description of Unknown: Thrombin cleavage domain sequence"
  MOD_RES (2)..(2): 2-carboxy piperdine
FXRS

SEQ ID NO: 32 - protein, 6 aa, Unknown
  source: /note="Description of Unknown: Thrombin cleavage domain sequence"
DPRSFL

SEQ ID NO: 33 - protein, 6 aa, Unknown
  source: /note="Description of Unknown: Thrombin cleavage domain sequence"
PPRSFL

SEQ ID NO: 34 - protein, 4 aa, Unknown
  source: /note="Description of Unknown: Caspase-3 cleavage domain sequence"
DEVD

SEQ ID NO: 35 - protein, 5 aa, Unknown
  source: /note="Description of Unknown: Caspase-3 cleavage domain sequence"
DEVDP

SEQ ID NO: 36 - protein, 8 aa, Unknown
  source: /note="Description of Unknown: Caspase-3 cleavage domain sequence"
KGSGDVEG

SEQ ID NO: 37 - protein, 6 aa, Unknown
  source: /note="Description of Unknown: Interleukin 1-beta converting enzyme cleavage domain" sequence
GWEHDG

SEQ ID NO: 38 - protein, 7 aa, Unknown
  source: /note="Description of Unknown: Enterokinase cleavage domain sequence"
EDDDDKA

SEQ ID NO: 39 - protein, 9 aa, Unknown
  source: /note="Description of Unknown: FAP cleavage domain sequence"
KQEQNPGST

SEQ ID NO: 40 - protein, 6 aa, Unknown
  source: /note="Description of Unknown: Kallikrein 2 cleavage domain sequence"
GKAFRR

SEQ ID NO: 41 - protein, 4 aa, Unknown
  source: /note="Description of Unknown: Plasmin cleavage domain sequence"
DAFK

SEQ ID NO: 42 - protein, 4 aa, Unknown
  source: /note="Description of Unknown: Plasmin cleavage domain sequence"
DVLK

SEQ ID NO: 43 - protein, 4 aa, Unknown
  source: /note="Description of Unknown: Plasmin cleavage domain sequence"
DAFK

SEQ ID NO: 44 - protein, 7 aa, Unknown
  source: /note="Description of Unknown: TOP cleavage domain sequence"
ALLLALL

SEQ ID NO: 45 - protein, 652 aa, Artificial Sequence
  source: /note="Description of Artificial Sequence: Synthetic polypeptide"
QVQLQESGGGLVQAGGSLRLSCAASGRIFSIDIMSWYRQAPGKQRELVARITRGGTISYDDSVKGRFTISRDNAKNTVYLQMNSLKPEDTGVYYCNALYGTDYWGKGTQVTVSSGGGGSGGGGSGGGGSAPTSSSTKKTQLQLEHLLLDLQMILNGINNYKNPKLTRMLTFKFYMPKKATELKHLQCLEEELKPLEEVLNLAQSKNFHLRPRDLISNINVIVLELKGSETTFMCEYADETATIVEFLNRWITFCQSIISTLTSGGPGPAGMKGLPGSEVQLVESGGGLVQPGNSLRLSCAASGFTFSKFGMSWVRQAPGKGLEWVSSISGSGRDTLYAESVKGRFTISRDNAKTTLYLQMNSLRPEDTAVYYCTIGGSLSVSSQGTLVTVSSGGGGSGGGGSGGGGSEVQLVESGGGLVQPGGSLRLSCAASGFTFSSYTLAWVRQAPGKGLEWVAAIDSSSYTYSPDTVRGRFTISRDNAKNSLYLQMNSLRAEDTAVYYCARDSNWDALDYWGQGTTVTVSSGGGGSGGGGSGGGGSDIQMTQSPSSLSASVGDRVTITCKASQNVGTNVGWYQQKPGKAPKALIYSASFRYSGVPSRFSGSGSGTDFTLTISSLQPEDFATYYCQQYYTYPYTFGGGTKVEIKHHHHHH

SEQ ID NO: 46 - protein, 652 aa, Artificial Sequence
  source: /note="Description of Artificial Sequence: Synthetic polypeptide"
QVQLQESGGGLVQAGGSLRLSCAASGRIFSIDIMSWYRQAPGKQRELVARITRGGTISYDDSVKGRFTISRDNAKNTVYLQMNSLKPEDTGVYYCNALYGTDYWGKGTQVTVSSGGGGSGGGGSGGGGSEVQLVESGGGLVQPGGSLRLSCAASGFTFSSYTLAWVRQAPGKGLEWVAAIDSSSYTYSPDTVRGRFTISRDNAKNSLYLQMNSLRAEDTAVYYCARDSNWDALDYWGQGTTVTVSSGGGGSGGGGSGGGGSDIQMTQSPSSLSASVGDRVTITCKASQNVGTNVGWYQQKPGKAPKALIYSASFRYSGVPSRFSGSGSGTDFTLTISSLQPEDFATYYCQQYYTYPYTFGGGTKVEIKGGGGSGGGGSGGGGSEVQLVESGGGLVQPGNSLRLSCAASGFTFSKFGMSWVRQAPGKGLEWVSSISGSGRDTLYAESVKGRFTISRDNAKTTLYLQMNSLRPEDTAVYYCTIGGSLSVSSQGTLVTVSSSGGPGPAGMKGLPGSAPTSSSTKKTQLQLEHLLLDLQMILNGINNYKNPKLTRMLTFKFYMPKKATELKHLQCLEEELKPLEEVLNLAQSKNFHLRPRDLISNINVIVLELKGSETTFMCEYADETATIVEFLNRWITFCQSIISTLTHHHHHH

SEQ ID NO: 47 - protein, 553 aa, Artificial Sequence
  source: /note="Description of Artificial Sequence: Synthetic polypeptide"
EVQLVESGGGLVQPGGSLRLSCAASGFTFSSYTLAWVRQAPGKGLEWVAAIDSSSYTYSPDTVRGRFTISRDNAKNSLYLQMNSLRAEDTAVYYCARDSNWDALDYWGQGTTVTVSSGGGGSGGGGSGGGGSDIQMTQSPSSLSASVGDRVTITCKASQNVGTNVGWYQQKPGKAPKALIYSASFRYSGVPSRFSGSGSGTDFTLTISSLQPEDFATYYCQQYYTYPYTFGGGTKVEIKGGGGSGGGGSGGGGSGGGGSGGGGSGGGGSSGGPGPAGMKGLPGSAPTSSSTKKTQLQLEHLLLDLQMILNGINNYKNPKLTRMLTFKFYMPKKATELKHLQCLEEELKPLEEVLNLAQSKNFHLRPRDLISNINVIVLELKGSETTFMCEYADETATIVEFLNRWITFCQSIISTLTSGGPGPAGMKGLPGSEVQLVESGGGLVQPGNSLRLSCAASGFTFSKFGMSWVRQAPGKGLEWVSSISGSGRDTLYAESVKGRFTISRDNAKTTLYLQMNSLRPEDTAVYYCTIGGSLSVSSQGTLVTVSSHHHHHH

SEQ ID NO: 48 - protein, 553 aa, Artificial Sequence
  source: /note="Description of Artificial Sequence: Synthetic polypeptide"
EVQLVESGGGLVQPGGSLRLSCAASGFTFSSYTLAWVRQAPGKGLEWVAAIDSSSYTYSPDTVRGRFTISRDNAKNSLYLQMNSLRAEDTAVYYCARDSNWDALDYWGQGTTVTVSSGGGGSGGGGSGGGGSDIQMTQSPSSLSASVGDRVTITCKASQNVGTNVGWYQQKPGKAPKALIYSASFRYSGVPSRFSGSGSGTDFTLTISSLQPEDFATYYCQQYYTYPYTFGGGTKVEIKGGGGSGGGGSGGGGSGGGGSGGGGSGGGGSEVQLVESGGGLVQPGNSLRLSCAASGFTFSKFGMSWVRQAPGKGLEWVSSISGSGRDTLYAESVKGRFTISRDNAKTTLYLQMNSLRPEDTAVYYCTIGGSLSVSSQGTLVTVSSGGGGSGGGGSGGGGSSGGPGPAGMKGLPGSAPTSSSTKKTQLQLEHLLLDLQMILNGINNYKNPKLTRMLTFKFYMPKKATELKHLQCLEEELKPLEEVLNLAQSKNFHLRPRDLISNINVIVLELKGSETTFMCEYADETATIVEFLNRWITFCQSIISTLTHHHHHH

SEQ ID NO: 49 - protein, 553 aa, Artificial Sequence
  source: /note="Description of Artificial Sequence: Synthetic polypeptide"
APTSSSTKKTQLQLEHLLLDLQMILNGINNYKNPKLTRMLTFKFYMPKKATELKHLQCLEEELKPLEEVLNLAQSKNFHLRPRDLISNINVIVLELKGSETTFMCEYADETATIVEFLNRWITFCQSIISTLTSGGPGPAGMKGLPGSEVQLVESGGGLVQPGNSLRLSCAASGFTFSKFGMSWVRQAPGKGLEWVSSISGSGRDTLYAESVKGRFTISRDNAKTTLYLQMNSLRPEDTAVYYCTIGGSLSVSSQGTLVTVSSGGGGSGGGGSGGGGSGGGGSGGGGSGGGGSSGGPGPAGMKGLPGSEVQLVESGGGLVQPGGSLRLSCAASGFTFSSYTLAWVRQAPGKGLEWVAAIDSSSYTYSPDTVRGRFTISRDNAKNSLYLQMNSLRAEDTAVYYCARDSNWDALDYWGQGTTVTVSSGGGGSGGGGSGGGGSDIQMTQSPSSLSASVGDRVTITCKASQNVGTNVGWYQQKPGKAPKALIYSASFRYSGVPSRFSGSGSGTDFTLTISSLQPEDFATYYCQQYYTYPYTFGGGTKVEIKHHHHHH

SEQ ID NO: 50 - protein, 682 aa, Artificial Sequence
  source: /note="Description of Artificial Sequence: Synthetic polypeptide"
QVQLQESGGGLVQAGGSLRLSCAASGRIFSIDIMSWYRQAPGKQRELVARITRGGTISYDDSVKGRFTISRDNAKNTVYLQMNSLKPEDTGVYYCNALYGTDYWGKGTQVTVSSGGGGSGGGGSGGGGSAPTSSSTKKTQLQLEHLLLDLQMILNGINNYKNPKLTRMLTFKFYMPKKATELKHLQCLEEELKPLEEVLNLAQSKNFHLRPRDLISNINVIVLELKGSETTFMCEYADETATIVEFLNRWITFCQSIISTLTSGGPGPAGMKGLPGSEVQLVESGGGLVQPGNSLRLSCAASGFTFSKFGMSWVRQAPGKGLEWVSSISGSGRDTLYAESVKGRFTISRDNAKTTLYLQMNSLRPEDTAVYYCTIGGSLSVSSQGTLVTVSSGGGGSGGGGSGGGGSGGGGSGGGGSGGGGSSGGPGPAGMKGLPGSEVQLVESGGGLVQPGGSLRLSCAASGFTFSSYTLAWVRQAPGKGLEWVAAIDSSSYTYSPDTVRGRFTISRDNAKNSLYLQMNSLRAEDTAVYYCARDSNWDALDYWGQGTTVTVSSGGGGSGGGGSGGGGSDIQMTQSPSSLSASVGDRVTITCKASQNVGTNVGWYQQKPGKAPKALIYSASFRYSGVPSRFSGSGSGTDFTLTISSLQPEDFATYYCQQYYTYPYTFGGGTKVEIKHHHHHH

SEQ ID NO: 51 - protein, 667 aa, Artificial Sequence
  source: /note="Description of Artificial Sequence: Synthetic polypeptide"
QVQLQESGGGLVQAGGSLRLSCAASGRIFSIDIMSWYRQAPGKQRELVARITRGGTISYDDSVKGRFTISRDNAKNTVYLQMNSLKPEDTGVYYCNALYGTDYWGKGTQVTVSSGGGGSGGGGSGGGGSAPTSSSTKKTQLQLEHLLLDLQMILNGINNYKNPKLTRMLTFKFYMPKKATELKHLQCLEEELKPLEEVLNLAQSKNFHLRPRDLISNINVIVLELKGSETTFMCEYADETATIVEFLNRWITFCQSIISTLTSGGPGPAGMKGLPGSEVQLVESGGGLVQPGNSLRLSCAASGFTFSKFGMSWVRQAPGKGLEWVSSISGSGRDTLYAESVKGRFTISRDNAKTTLYLQMNSLRPEDTAVYYCTIGGSLSVSSQGTLVTVSSGGGGSGGGGSGGGGSGGGGSGGGGSGGGGSEVQLVESGGGLVQPGGSLRLSCAASGFTFSSYTLAWVRQAPGKGLEWVAAIDSSSYTYSPDTVRGRFTISRDNAKNSLYLQMNSLRAEDTAVYYCARDSNWDALDYWGQGTTVTVSSSGGPGPAGMKGLPGSDIQMTQSPSSLSASVGDRVTITCKASQNVGTNVGWYQQKPGKAPKALIYSASFRYSGVPSRFSGSGSGTDFTLTISSLQPEDFATYYCQQYYTYPYTFGGGTKVEIKHHHHHH

SEQ ID NO: 52 - protein, 682 aa, Artificial Sequence
  source: /note="Description of Artificial Sequence: Synthetic polypeptide"
APTSSSTKKTQLQLEHLLLDLQMILNGINNYKNPKLTRMLTFKFYMPKKATELKHLQCLEEELKPLEEVLNLAQSKNFHLRPRDLISNINVIVLELKGSETTFMCEYADETATIVEFLNRWITFCQSIISTLTSGGPGPAGMKGLPGSGGGGSGGGGSGGGGSGGGGSGGGGSGGGGSEVQLVESGGGLVQPGGSLRLSCAASGFTFSSYTLAWVRQAPGKGLEWVAAIDSSSYTYSPDTVRGRFTISRDNAKNSLYLQMNSLRAEDTAVYYCARDSNWDALDYWGQGTTVTVSSGGGGSGGGGSGGGGSDIQMTQSPSSLSASVGDRVTITCKASQNVGTNVGWYQQKPGKAPKALIYSASFRYSGVPSRFSGSGSGTDFTLTISSLQPEDFATYYCQQYYTYPYTFGGGTKVEIKGGGGSGGGGSGGGGSEVQLVESGGGLVQPGNSLRLSCAASGFTFSKFGMSWVRQAPGKGLEWVSSISGSGRDTLYAESVKGRFTISRDNAKTTLYLQMNSLRPEDTAVYYCTIGGSLSVSSQGTLVTVSSGGGGSGGGGSGGGGSQVQLQESGGGLVQAGGSLRLSCAASGRIFSIDIMSWYRQAPGKQRELVARITRGGTISYDDSVKGRFTISRDNAKNTVYLQMNSLKPEDTGVYYCNALYGTDYWGKGTQVTVSSHHHHHH

SEQ ID NO: 53 - protein, 393 aa, Artificial Sequence
  source: /note="Description of Artificial Sequence: Synthetic polypeptide"
APTSSSTKKTQLQLEHLLLDLQMILNGINNYKNPKLTRMLTFKFYMPKKATELKHLQCLEEELKPLEEVLNLAQSKNFHLRPRDLISNINVIVLELKGSETTFMCEYADETATIVEFLNRWITFCQSIISTLTSGGPGPAGMKGLPGSEVQLVESGGGLVQPGGSLRLSCAASGFTFSSYTLAWVRQAPGKGLEWVAAIDSSSYTYSPDTVRGRFTISRDNAKNSLYLQMNSLRAEDTAVYYCARDSNWDALDYWGQGTTVTVSSGGGGSGGGGSGGGGSDIQMTQSPSSLSASVGDRVTITCKASQNVGTNVGWYQQKPGKAPKALIYSASFRYSGVPSRFSGSGSGTDFTLTISSLQPEDFATYYCQQYYTYPYTFGGGTKVEIKHHHHHH

SEQ ID NO: 54 - protein, 423 aa, Artificial Sequence
  source: /note="Description of Artificial Sequence: Synthetic polypeptide"
APTSSSTKKTQLQLEHLLLDLQMILNGINNYKNPKLTRMLTFKFYMPKKATELKHLQCLEEELKPLEEVLNLAQSKNFHLRPRDLISNINVIVLELKGSETTFMCEYADETATIVEFLNRWITFCQSIISTLTSGGPGPAGMKGLPGSGGGGSGGGGSGGGGSGGGGSGGGGSGGGGSEVQLVESGGGLVQPGGSLRLSCAASGFTFSSYTLAWVRQAPGKGLEWVAAIDSSSYTYSPDTVRGRFTISRDNAKNSLYLQMNSLRAEDTAVYYCARDSNWDALDYWGQGTTVTVSSGGGGSGGGGSGGGGSDIQMTQSPSSLSASVGDRVTITCKASQNVGTNVGWYQQKPGKAPKALIYSASFRYSGVPSRFSGSGSGTDFTLTISSLQPEDFATYYCQQYYTYPYTFGGGTKVEIKHHHHHH

SEQ ID NO: 55 - protein, 682 aa, Artificial Sequence
  source: /note="Description of Artificial Sequence: Synthetic polypeptide"
APTSSSTKKTQLQLEHLLLDLQMILNGINNYKNPKLTRMLTFKFYMPKKATELKHLQCLEEELKPLEEVLNLAQSKNFHLRPRDLISNINVIVLELKGSETTFMCEYADETATIVEFLNRWITFCQSIISTLTSGGPGPAGMKGLPGSGGGGSGGGGSGGGGSGGGGSGGGGSGGGGSEVQLVESGGGLVQPGGSLRLSCAASGFTFSSYTLAWVRQAPGKGLEWVAAIDSSSYTYSPDTVRGRFTISRDNAKNSLYLQMNSLRAEDTAVYYCARDSNWDALDYWGQGTTVTVSSGGGGSGGGGSGGGGSDIQMTQSPSSLSASVGDRVTITCKASQNVGTNVGWYQQKPGKAPKALIYSASFRYSGVPSRFSGSGSGTDFTLTISSLQPEDFATYYCQQYYTYPYTFGGGTKVEIKSGGPGPAGMKGLPGSEVQLVESGGGLVQPGNSLRLSCAASGFTFSKFGMSWVRQAPGKGLEWVSSISGSGRDTLYAESVKGRFTISRDNAKTTLYLQMNSLRPEDTAVYYCTIGGSLSVSSQGTLVTVSSGGGGSGGGGSGGGGSQVQLQESGGGLVQAGGSLRLSCAASGRIFSIDIMSWYRQAPGKQRELVARITRGGTISYDDSVKGRFTISRDNAKNTVYLQMNSLKPEDTGVYYCNALYGTDYWGKGTQVTVSSHHHHHH

SEQ ID NO: 56 - protein, 682 aa, Artificial Sequence
  source: /note="Description of Artificial Sequence: Synthetic polypeptide"
QVQLQESGGGLAQAGGSLSLSCAASGFTVSNSVMAWYRQTPGKQREFVAIINSVGSTNYADSVKGRFTISRDNAKNTVYLQMNNLKPEDTAVYVCNRNFDRIYWGQGTQVTVSSSGGPGPAGMKGLPGSEVQLVESGGGLVQPGGSLRLSCAASGFTFSSYTLAWVRQAPGKGLEWVAAIDSSSYTYSPDTVRGRFTISRDNAKNSLYLQMNSLRAEDTAVYYCARDSNWDALDYWGQGTTVTVSSGGGGSGGGGSGGGGSDIQMTQSPSSLSASVGDRVTITCKASQNVGTNVGWYQQKPGKAPKALIYSASFRYSGVPSRFSGSGSGTDFTLTISSLQPEDFATYYCQQYYTYPYTFGGGTKVEIKGGGGSGGGGSGGGGSGGGGSGGGGSGGGGSSGGPGPAGMKGLPGSEVQLVESGGGLVQPGNSLRLSCAASGFTFSKFGMSWVRQAPGKGLEWVSSISGSGRDTLYAESVKGRFTISRDNAKTTLYLQMNSLRPEDTAVYYCTIGGSLSVSSQGTLVTVSSSGGPGPAGMKGLPGSAPTSSSTKKTQLQLEHLLLDLQMILNGINNYKNPKLTRMLTFKFYMPKKATELKHLQCLEEELKPLEEVLNLAQSKNFHLRPRDLISNINVIVLELKGSETTFMCEYADETATIVEFLNRWITFCQSIISTLTHHHHHH

SEQ ID NO: 57 - protein, 393 aa, Artificial Sequence
  source: /note="Description of Artificial Sequence: Synthetic polypeptide"
EVQLVESGGGLVQPGGSLRLSCAASGFTFSSYTLAWVRQAPGKGLEWVAAIDSSSYTYSPDTVRGRFTISRDNAKNSLYLQMNSLRAEDTAVYYCARDSNWDALDYWGQGTTVTVSSGGGGSGGGGSGGGGSDIQMTQSPSSLSASVGDRVTITCKASQNVGTNVGWYQQKPGKAPKALIYSASFRYSGVPSRFSGSGSGTDFTLTISSLQPEDFATYYCQQYYTYPYTFGGGTKVEIKSGGPGPAGMKGLPGSAPTSSSTKKTQLQLEHLLLDLQMILNGINNYKNPKLTRMLTFKFYMPKKATELKHLQCLEEELKPLEEVLNLAQSKNFHLRPRDLISNINVIVLELKGSETTFMCEYADETATIVEFLNRWITFCQSIISTLTHHHHHH

SEQ ID NO: 58 - protein, 423 aa, Artificial Sequence
  source: /note="Description of Artificial Sequence: Synthetic polypeptide"
EVQLVESGGGLVQPGGSLRLSCAASGFTFSSYTLAWVRQAPGKGLEWVAAIDSSSYTYSPDTVRGRFTISRDNAKNSLYLQMNSLRAEDTAVYYCARDSNWDALDYWGQGTTVTVSSGGGGSGGGGSGGGGSDIQMTQSPSSLSASVGDRVTITCKASQNVGTNVGWYQQKPGKAPKALIYSASFRYSGVPSRFSGSGSGTDFTLTISSLQPEDFATYYCQQYYTYPYTFGGGTKVEIKGGGGSGGGGSGGGGSGGGGSGGGGSGGGGSSGGPGPAGMKGLPGSAPTSSSTKKTQLQLEHLLLDLQMILNGINNYKNPKLTRMLTFKFYMPKKATELKHLQCLEEELKPLEEVLNLAQSKNFHLRPRDLISNINVIVLELKGSETTFMCEYADETATIVEFLNRWITFCQSIISTLTHHHHHH

SEQ ID NO: 59 - protein, 669 aa, Artificial Sequence
  source: /note="Description of Artificial Sequence: Synthetic polypeptide"
QVQLQESGGGLVQAGGSLRLSCAASGRIFSIDIMSWYRQAPGKQRELVARITRGGTISYDDSVKGRFTISRDNAKNTVYLQMNSLKPEDTGVYYCNALYGTDYWGKGTQVTVSSGGGGSGGGGSGGGGSAPTSSSTKKTQLQLEHLLLDLQMILNGINNYKNPKLTRMLTFKFYMPKKATELKHLQCLEEELKPLEEVLNLAQSKNFHLRPRDLISNINVIVLELKGSETTFMCEYADETATIVEFLNRWITFCQSIISTLTSGGPGPAGMKGLPGSEVQLVESGGGLVQPGNSLRLSCAASGFTFSKFGMSWVRQAPGKGLEWVSSISGSGRDTLYAESVKGRFTISRDNAKTTLYLQMNSLRPEDTAVYYCTIGGSLSVSSQGTLVTVSSGGGGSGGGGSGGGGSGGGGSQVQLQQSGAELVRPGTSVKVSCKASGYAFTNYLIEWVKQRPGQGLEWIGVINPGSGGTNYNEKFKGKATLTADKSSSTAYMQLSSLTSDDSAVYFCARWRGDGYYAYFDVWGAGTTVTVSSGGGGSGGGGSGGGGSDIVLTQSPASLAVSLGQRATISCKASQSVDYDGDSYMNWYQQKPGQPPKLLIYAASNLESGIPARFSGSGSGTDFTLNIHPVEEEDAATYYCQQSNEDPYTFGGGTKLEIKHHHHHHEPEA

SEQ ID NO: 60 - protein, 669 aa, Artificial Sequence
  source: /note="Description of Artificial Sequence: Synthetic polypeptide"
QVQLQESGGGLVQAGGSLRLSCAASGRIFSIDIMSWYRQAPGKQRELVARITRGGTISYDDSVKGRFTISRDNAKNTVYLQMNSLKPEDTGVYYCNALYGTDYWGKGTQVTVSSGGGGSGGGGSGGGGSAPTSSSTKKTQLQLEHLLLDLQMILNGINNYKNPKLTRMLTFKFYMPKKATELKHLQCLEEELKPLEEVLNLAQSKNFHLRPRDLISNINVIVLELKGSETTFMCEYADETATIVEFLNRWITFCQSIISTLTSGGPGPAGMKGLPGSEVQLVESGGGLVQPGNSLRLSCAASGFTFSKFGMSWVRQAPGKGLEWVSSISGSGRDTLYAESVKGRFTISRDNAKTTLYLQMNSLRPEDTAVYYCTIGGSLSVSSQGTLVTVSSGGGGSGGGGSGGGGSGGGGSDIVLTQSPASLAVSLGQRATISCKASQSVDYDGDSYMNWYQQKPGQPPKLLIYAASNLESGIPARFSGSGSGTDFTLNIHPVEEEDAATYYCQQSNEDPYTFGGGTKLEIKGGGGSGGGGSGGGGSQVQLQQSGAELVRPGTSVKVSCKASGYAFTNYLIEWVKQRPGQGLEWIGVINPGSGGTNYNEKFKGKATLTADKSSSTAYMQLSSLTSDDSAVYFCARWRGDGYYAYFDVWGAGTTVTVSSHHHHHHEPEA

SEQ ID NO: 61 - protein, 689 aa, Artificial Sequence
  source: /note="Description of Artificial Sequence: Synthetic polypeptide"
APTSSSTKKTQLQLEHLLLDLQMILNGINNYKNPKLTRMLTFKFYMPKKATELKHLQCLEEELKPLEEVLNLAQSKNFHLRPRDLISNINVIVLELKGSETTFMCEYADETATIVEFLNRWITFCQSIISTLTSGGPGPAGMKGLPGSGGGGSGGGGSGGGGSGGGGSGGGGSQVQLQQSGAELVRPGTSVKVSCKASGYAFTNYLIEWVKQRPGQGLEWIGVINPGSGGTNYNEKFKGKATLTADKSSSTAYMQLSSLTSDDSAVYFCARWRGDGYYAYFDVWGAGTTVTVSSGGGGSGGGGSGGGGSDIVLTQSPASLAVSLGQRATISCKASQSVDYDGDSYMNWYQQKPGQPPKLLIYAASNLESGIPARFSGSGSGTDFTLNIHPVEEEDAATYYCQQSNEDPYTFGGGTKLEIKGGGGSGGGGSGGGGSEVQLVESGGGLVQPGNSLRLSCAASGFTFSKFGMSWVRQAPGKGLEWVSSISGSGRDTLYAESVKGRFTISRDNAKTTLYLQMNSLRPEDTAVYYCTIGGSLSVSSQGTLVTVSSGGGGSGGGGSGGGGSQVQLQESGGGLVQAGGSLRLSCAASGRIFSIDIMSWYRQAPGKQRELVARITRGGTISYDDSVKGRFTISRDNAKNTVYLQMNSLKPEDTGVYYCNALYGTDYWGKGTQVTVSSHHHHHHEPEA

SEQ ID NO: 62 - protein, 689 aa, Artificial Sequence
  source: /note="Description of Artificial Sequence: Synthetic polypeptide"
APTSSSTKKTQLQLEHLLLDLQMILNGINNYKNPKLTRMLTFKFYMPKKATELKHLQCLEEELKPLEEVLNLAQSKNFHLRPRDLISNINVIVLELKGSETTFMCEYADETATIVEFLNRWITFCQSIISTLTSGGPGPAGMKGLPGSGGGGSGGGGSGGGGSGGGGSGGGGSDIVLTQSPASLAVSLGQRATISCKASQSVDYDGDSYMNWYQQKPGQPPKLLIYAASNLESGIPARFSGSGSGTDFTLNIHPVEEEDAATYYCQQSNEDPYTFGGGTKLEIKGGGGSGGGGSGGGGSQVQLQQSGAELVRPGTSVKVSCKASGYAFTNYLIEWVKQRPGQGLEWIGVINPGSGGTNYNEKFKGKATLTADKSSSTAYMQLSSLTSDDSAVYFCARWRGDGYYAYFDVWGAGTTVTVSSGGGGSGGGGSGGGGSEVQLVESGGGLVQPGNSLRLSCAASGFTFSKFGMSWVRQAPGKGLEWVSSISGSGRDTLYAESVKGRFTISRDNAKTTLYLQMNSLRPEDTAVYYCTIGGSLSVSSQGTLVTVSSGGGGSGGGGSGGGGSQVQLQESGGGLVQAGGSLRLSCAASGRIFSIDIMSWYRQAPGKQRELVARITRGGTISYDDSVKGRFTISRDNAKNTVYLQMNSLKPEDTGVYYCNALYGTDYWGKGTQVTVSSHHHHHHEPEA

SEQ ID NO: 63 - protein, 272 aa, Unknown
  source: /note="Description of Unknown: IL2Ra sequence"
MDSYLLMWGLLTFIMVPGCQAELCDDDPPEIPHATFKAMAYKEGTMLNCECKRGFRRIKSGSLYMLCTGNSSHSSWDNQCQCTSSATRNTTKQVTPQPEEQKERKTTEMQSPMQPVDQASLPGHCREPPPWENEATERIYHFVVGQMVYYQCVQGYRALHRGPAESVCKMTHGKTRWTQPQLICTGEMETSQFPGEEKPQASPEGRPESETSCLVTTTDFQIQTEMAATMETSIFTTEYQVAVAGCVFLLISVLLLSGLTWQRRQRKSRRTI

SEQ ID NO: 64 - protein, 551 aa, Unknown
  source: /note="Description of Unknown: IL2Rb sequence"
MAAPALSWRLPLLILLLPLATSWASAAVNGTSQFTCFYNSRANISCVWSQDGALQDTSCQVHAWPDRRRWNQTCELLPVSQASWACNLILGAPDSQKLTTVDIVTLRVLCREGVRWRVMAIQDFKPFENLRLMAPISLQVVHVETHRCNISWEISQASHYFERHLEFEARTLSPGHTWEEAPLLTLKQKQEWICLETLTPDTQYEFQVRVKPLQGEFTTWSPWSQPLAFRTKPAALGKDTIPWLGHLLVGLSGAFGFIILVYLLINCRNTGPWLKKVLKCNTPDPSKFFSQLSSEHGGDVQKWLSSPFPSSSFSPGGLAPEISPLEVLERDKVTQLLLQQDKVPEPASLSSNHSLTSCFTNQGYFFFHLPDALEIEACQVYFTYDPYSEEDPDEGVAGAPTGSSPQPLQPLSGEDDAYCTFPSRDDLLLFSPSLLGGPSPPSTAPGGSGAGEERMPPSLQERVPRDWDPQPLGPPTPGVPDLVDFQPPPELVLREAGEEVPDAGPREGVSFPWSRPPGQGEFRALNARLPLNTDAYLSLQELQGQDPTHLV

SEQ ID NO: 65 - protein, 369 aa, Unknown
  source: /note="Description of Unknown: IL2Rg sequence"
MLKPSLPFTSLLFLQLPLLGVGLNTTILTPNGNEDTTADFFLTTMPTDSLSVSTLPLPEVQCFVFNVEYMNCTWNSSSEPQPTNLTLHYWYKNSDNDKVQKCSHYLFSEEITSGCQLQKKEIHLYQTFVVQLQDPREPRRQATQMLKLQNLVIPWAPENLTLHKLSESQLELNWNNRFLNHCLEHLVQYRTDWDHSWTEQSVDYRHKFSLPSVDGQKRYTFRVRSRFNPLCGSAQHWSEWSHPIHWGSNTSKENPFLFALEAVVISVGSMGLIISLLCVYFWLERTMPRIPTLKNLEDLVTEYHGNFSAWSGVSKGLAESLQPDYSERLCLVSEIPPKGGALGEGPGASPCNQHSPYWAPPCYTLKPET

SEQ ID NO: 66 - protein, 520 aa, Artificial Sequence
  source: /note="Description of Artificial Sequence: Synthetic polypeptide"
IWELKKDVYVVELDWYPDAPGEMVVLTCDTPEEDGITWTLDQSSEVLGSGKTLTIQVKEFGDAGQYTCHKGGEVLSHSLLLLHKKEDGIWSTDILKDQKEPKNKTFLRCEAKNYSGRFTCWWLTTISTDLTFSVKSSRGSSDPQGVTCGAATLSAERVRGDNKEYEYSVECQEDSACPAAEESLPIEVMVDAVHKLKYENYTSSFFIRDIIKPDPPKNLQLKPLKNSRQVEVSWEYPDTWSTPHSYFSLTFCVQVQGKSKREKKDRVFTDKTSATVICRKNASISVRAQDRYYSSSWSEWASVPCSGGGGSGGGGSGGGGSRVIPVSGPARCLSQSRNLLKTTDDMVKTAREKLKHYSCTAEDIDHEDITRDQTSTLKTCLPLELHKNESCLATRETSSTTRGSCLPPQKTSLMMTLCLGSIYEDLKMYQTEFQAINAALQNHNHQQIILDKGMLVAIDELMQSLNHNGETLRQKPPVGEADPYRVKMKLCILLHAFSTRVVTINRVMGYLSSAHHHHHH

SEQ ID NO: 67 - protein, 524 aa, Artificial Sequence
  source: /note="Description of Artificial Sequence: Synthetic polypeptide"
IWELKKDVYVVELDWYPDAPGEMVVLTCDTPEEDGITWTLDQSSEVLGSGKTLTIQVKEFGDAGQYTCHKGGEVLSHSLLLLHKKEDGIWSTDILKDQKEPKNKTFLRCEAKNYSGRFTCWWLTTISTDLTFSVKSSRGSSDPQGVTCGAATLSAERVRGDNKEYEYSVECQEDSACPAAEESLPIEVMVDAVHKLKYENYTSSFFIRDIIKPDPPKNLQLKPLKNSRQVEVSWEYPDTWSTPHSYFSLTFCVQVQGKSKREKKDRVFTDKTSATVICRKNASISVRAQDRYYSSSWSEWASVPCSGGGGSGGGGSGGGGSRNLPVATPDPGMFPCLHHSQNLLRAVSNMLQKARQTLEFYPCTSEEIDHEDITKDKTSTVEACLPLELTKNESCLNSRETSFITNGSCLASRKTSFMMALCLSSIYEDLKMYQVEFKTMNAKLLMDPKRQIFLDQNMLAVIDELMQALNFNSETVPQKSSLEEPDFYKTKIKLCILLHAFRIRAVTIDRVMSYLNASHHHHHH

SEQ ID NO: 68 - protein, 940 aa, Artificial Sequence
  source: /note="Description of Artificial Sequence: Synthetic polypeptide"
QSVLTQPPSVSGAPGQRVTISCSGSRSNIGSNTVKWYQQLPGTAPKLLIYYNDQRPSGVPDRFSGSKSGTSASLAITGLQAEDEADYYCQSYDRYTHPALLFGTGTKVTVLGGGGSGGGGSGGGGSQVQLVESGGGVVQPGRSLRLSCAASGFTFSSYGMHWVRQAPGKGLEWVAFIRYDGSNKYYADSVKGRFTISRDNSKNTLYLQMNSLRAEDTAVYYCKTHGSHDNWGQGTMVTVSSGGGGSGGGGSGGGGSGGGGSGGGGSGGGGSSGGPGPAGMKGLPGSIWELKKDVYVVELDWYPDAPGEMVVLTCDTPEEDGITWTLDQSSEVLGSGKTLTIQVKEFGDAGQYTCHKGGEVLSHSLLLLHKKEDGIWSTDILKDQKEPKNKTFLRCEAKNYSGRFTCWWLTTISTDLTFSVKSSRGSSDPQGVTCGAATLSAERVRGDNKEYEYSVECQEDSACPAAEESLPIEVMVDAVHKLKYENYTSSFFIRDIIKPDPPKNLQLKPLKNSRQVEVSWEYPDTWSTPHSYFSLTFCVQVQGKSKREKKDRVFTDKTSATVICRKNASISVRAQDRYYSSSWSEWASVPCSGGGGSGGGGSGGGGSRVIPVSGPARCLSQSRNLLKTTDDMVKTAREKLKHYSCTAEDIDHEDITRDQTSTLKTCLPLELHKNESCLATRETSSTTRGSCLPPQKTSLMMTLCLGSIYEDLKMYQTEFQAINAALQNHNHQQIILDKGMLVAIDELMQSLNHNGETLRQKPPVGEADPYRVKMKLCILLHAFSTRVVTINRVMGYLSSASGGPGPAGMKGLPGSEVQLVESGGGLVQPGNSLRLSCAASGFTFSKFGMSWVRQAPGKGLEWVSSISGSGRDTLYAESVKGRFTISRDNAKTTLYLQMNSLRPEDTAVYYCTIGGSLSVSSQGTLVTVSSHHHHHHEPEA

SEQ ID NO: 69 - protein, 1069 aa, Artificial Sequence
  source: /note="Description of Artificial Sequence: Synthetic polypeptide"
QSVLTQPPSVSGAPGQRVTISCSGSRSNIGSNTVKWYQQLPGTAPKLLIYYNDQRPSGVPDRFSGSKSGTSASLAITGLQAEDEADYYCQSYDRYTHPALLFGTGTKVTVLGGGGSGGGGSGGGGSQVQLVESGGGVVQPGRSLRLSCAASGFTFSSYGMHWVRQAPGKGLEWVAFIRYDGSNKYYADSVKGRFTISRDNSKNTLYLQMNSLRAEDTAVYYCKTHGSHDNWGQGTMVTVSSGGGGSGGGGSGGGGSGGGGSGGGGSGGGGSSGGPGPAGMKGLPGSIWELKKDVYVVELDWYPDAPGEMVVLTCDTPEEDGITWTLDQSSEVLGSGKTLTIQVKEFGDAGQYTCHKGGEVLSHSLLLLHKKEDGIWSTDILKDQKEPKNKTFLRCEAKNYSGRFTCWWLTTISTDLTFSVKSSRGSSDPQGVTCGAATLSAERVRGDNKEYEYSVECQEDSACPAAEESLPIEVMVDAVHKLKYENYTSSFFIRDIIKPDPPKNLQLKPLKNSRQVEVSWEYPDTWSTPHSYFSLTFCVQVQGKSKREKKDRVFTDKTSATVICRKNASISVRAQDRYYSSSWSEWASVPCSGGGGSGGGGSGGGGSRVIPVSGPARCLSQSRNLLKTTDDMVKTAREKLKHYSCTAEDIDHEDITRDQTSTLKTCLPLELHKNESCLATRETSSTTRGSCLPPQKTSLMMTLCLGSIYEDLKMYQTEFQAINAALQNHNHQQIILDKGMLVAIDELMQSLNHNGETLRQKPPVGEADPYRVKMKLCILLHAFSTRVVTINRVMGYLSSASGGPGPAGMKGLPGSEVQLVESGGGLVQPGNSLRLSCAASGFTFSKFGMSWVRQAPGKGLEWVSSISGSGRDTLYAESVKGRFTISRDNAKTTLYLQMNSLRPEDTAVYYCTIGGSLSVSSQGTLVTVSSGGGGSGGGGSGGGGSQVQLQESGGGLAQAGGSLSLSCAASGFTVSNSVMAWYRQTPGKQREFVAIINSVGSTNYADSVKGRFTISRDNAKNTVYLQMNNLKPEDTAVYVCNRNFDRIYWGQGTQVTVSSHHHHHHEPEA

SEQ ID NO: 70 - protein, 1069 aa, Artificial Sequence
  source: /note="Description of Artificial Sequence: Synthetic polypeptide"
QVQLQESGGGLAQAGGSLSLSCAASGFTVSNSVMAWYRQTPGKQREFVAIINSVGSTNYADSVKGRFTISRDNAKNTVYLQMNNLKPEDTAVYVCNRNFDRIYWGQGTQVTVSSGGGGSGGGGSGGGGSQSVLTQPPSVSGAPGQRVTISCSGSRSNIGSNTVKWYQQLPGTAPKLLIYYNDQRPSGVPDRFSGSKSGTSASLAITGLQAEDEADYYCQSYDRYTHPALLFGTGTKVTVLGGGGSGGGGSGGGGSQVQLVESGGGVVQPGRSLRLSCAASGFTFSSYGMHWVRQAPGKGLEWVAFIRYDGSNKYYADSVKGRFTISRDNSKNTLYLQMNSLRAEDTAVYYCKTHGSHDNWGQGTMVTVSSGGGGSGGGGSGGGGSGGGGSGGGGSGGGGSSGGPGPAGMKGLPGSIWELKKDVYVVELDWYPDAPGEMVVLTCDTPEEDGITWTLDQSSEVLGSGKTLTIQVKEFGDAGQYTCHKGGEVLSHSLLLLHKKEDGIWSTDILKDQKEPKNKTFLRCEAKNYSGRFTCWWLTTISTDLTFSVKSSRGSSDPQGVTCGAATLSAERVRGDNKEYEYSVECQEDSACPAAEESLPIEVMVDAVHKLKYENYTSSFFIRDIIKPDPPKNLQLKPLKNSRQVEVSWEYPDTWSTPHSYFSLTFCVQVQGKSKREKKDRVFTDKTSATVICRKNASISVRAQDRYYSSSWSEWASVPCSGGGGSGGGGSGGGGSRVIPVSGPARCLSQSRNLLKTTDDMVKTAREKLKHYSCTAEDIDHEDITRDQTSTLKTCLPLELHKNESCLATRETSSTTRGSCLPPQKTSLMMTLCLGSIYEDLKMYQTEFQAINAALQNHNHQQIILDKGMLVAIDELMQSLNHNGETLRQKPPVGEADPYRVKMKLCILLHAFSTRVVTINRVMGYLSSASGGPGPAGMKGLPGSEVQLVESGGGLVQPGNSLRLSCAASGFTFSKFGMSWVRQAPGKGLEWVSSISGSGRDTLYAESVKGRFTISRDNAKTTLYLQMNSLRPEDTAVYYCTIGGSLSVSSQGTLVTVSSHHHHHHEPEA

SEQ ID NO: 71 - protein, 940 aa, Artificial Sequence
  source: /note="Description of Artificial Sequence: Synthetic polypeptide"
EVQLVESGGGLVQPGNSLRLSCAASGFTFSKFGMSWVRQAPGKGLEWVSSISGSGRDTLYAESVKGRFTISRDNAKTTLYLQMNSLRPEDTAVYYCTIGGSLSVSSQGTLVTVSSGGGGSGGGGSGGGGSQSVLTQPPSVSGAPGQRVTISCSGSRSNIGSNTVKWYQQLPGTAPKLLIYYNDQRPSGVPDRFSGSKSGTSASLAITGLQAEDEADYYCQSYDRYTHPALLFGTGTKVTVLGGGGSGGGGSGGGGSQVQLVESGGGVVQPGRSLRLSCAASGFTFSSYGMHWVRQAPGKGLEWVAFIRYDGSNKYYADSVKGRFTISRDNSKNTLYLQMNSLRAEDTAVYYCKTHGSHDNWGQGTMVTVSSGGGGSGGGGSGGGGSGGGGSGGGGSGGGGSSGGPGPAGMKGLPGSIWELKKDVYVVELDWYPDAPGEMVVLTCDTPEEDGITWTLDQSSEVLGSGKTLTIQVKEFGDAGQYTCHKGGEVLSHSLLLLHKKEDGIWSTDILKDQKEPKNKTFLRCEAKNYSGRFTCWWLTTISTDLTFSVKSSRGSSDPQGVTCGAATLSAERVRGDNKEYEYSVECQEDSACPAAEESLPIEVMVDAVHKLKYENYTSSFFIRDIIKPDPPKNLQLKPLKNSRQVEVSWEYPDTWSTPHSYFSLTFCVQVQGKSKREKKDRVFTDKTSATVICRKNASISVRAQDRYYSSSWSEWASVPCSGGGGSGGGGSGGGGSRVIPVSGPARCLSQSRNLLKTTDDMVKTAREKLKHYSCTAEDIDHEDITRDQTSTLKTCLPLELHKNESCLATRETSSTTRGSCLPPQKTSLMMTLCLGSIYEDLKMYQTEFQAINAALQNHNHQQIILDKGMLVAIDELMQSLNHNGETLRQKPPVGEADPYRVKMKLCILLHAFSTRVVTINRVMGYLSSAHHHHHHEPEA

SEQ ID NO: 72 - protein, 940 aa, Artificial Sequence
  source: /note="Description of Artificial Sequence: Synthetic polypeptide"
EVQLVESGGGLVQPGNSLRLSCAASGFTFSKFGMSWVRQAPGKGLEWVSSISGSGRDTLYAESVKGRFTISRDNAKTTLYLQMNSLRPEDTAVYYCTIGGSLSVSSQGTLVTVSSSGGPGPAGMKGLPGSIWELKKDVYVVELDWYPDAPGEMVVLTCDTPEEDGITWTLDQSSEVLGSGKTLTIQVKEFGDAGQYTCHKGGEVLSHSLLLLHKKEDGIWSTDILKDQKEPKNKTFLRCEAKNYSGRFTCWWLTTISTDLTFSVKSSRGSSDPQGVTCGAATLSAERVRGDNKEYEYSVECQEDSACPAAEESLPIEVMVDAVHKLKYENYTSSFFIRDIIKPDPPKNLQLKPLKNSRQVEVSWEYPDTWSTPHSYFSLTFCVQVQGKSKREKKDRVFTDKTSATVICRKNASISVRAQDRYYSSSWSEWASVPCSGGGGSGGGGSGGGGSRVIPVSGPARCLSQSRNLLKTTDDMVKTAREKLKHYSCTAEDIDHEDITRDQTSTLKTCLPLELHKNESCLATRETSSTTRGSCLPPQKTSLMMTLCLGSIYEDLKMYQTEFQAINAALQNHNHQQIILDKGMLVAIDELMQSLNHNGETLRQKPPVGEADPYRVKMKLCILLHAFSTRVVTINRVMGYLSSASGGPGPAGMKGLPGSGGGGSGGGGSGGGGSGGGGSGGGGSGGGGSQSVLTQPPSVSGAPGQRVTISCSGSRSNIGSNTVKWYQQLPGTAPKLLIYYNDQRPSGVPDRFSGSKSGTSASLAITGLQAEDEADYYCQSYDRYTHPALLFGTGTKVTVLGGGGSGGGGSGGGGSQVQLVESGGGVVQPGRSLRLSCAASGFTFSSYGMHWVRQAPGKGLEWVAFIRYDGSNKYYADSVKGRFTISRDNSKNTLYLQMNSLRAEDTAVYYCKTHGSHDNWGQGTMVTVSSHHHHHHEPEA

SEQ ID NO: 73 - protein, 940 aa, Artificial Sequence
  source: /note="Description of Artificial Sequence: Synthetic polypeptide"
IWELKKDVYVVELDWYPDAPGEMVVLTCDTPEEDGITWTLDQSSEVLGSGKTLTIQVKEFGDAGQYTCHKGGEVLSHSLLLLHKKEDGIWSTDILKDQKEPKNKTFLRCEAKNYSGRFTCWWLTTISTDLTFSVKSSRGSSDPQGVTCGAATLSAERVRGDNKEYEYSVECQEDSACPAAEESLPIEVMVDAVHKLKYENYTSSFFIRDIIKPDPPKNLQLKPLKNSRQVEVSWEYPDTWSTPHSYFSLTFCVQVQGKSKREKKDRVFTDKTSATVICRKNASISVRAQDRYYSSSWSEWASVPCSGGGGSGGGGSGGGGSRVIPVSGPARCLSQSRNLLKTTDDMVKTAREKLKHYSCTAEDIDHEDITRDQTSTLKTCLPLELHKNESCLATRETSSTTRGSCLPPQKTSLMMTLCLGSIYEDLKMYQTEFQAINAALQNHNHQQIILDKGMLVAIDELMQSLNHNGETLRQKPPVGEADPYRVKMKLCILLHAFSTRVVTINRVMGYLSSASGGPGPAGMKGLPGSGGGGSGGGGSGGGGSGGGGSGGGGSGGGGSQSVLTQPPSVSGAPGQRVTISCSGSRSNIGSNTVKWYQQLPGTAPKLLIYYNDQRPSGVPDRFSGSKSGTSASLAITGLQAEDEADYYCQSYDRYTHPALLFGTGTKVTVLGGGGSGGGGSGGGGSQVQLVESGGGVVQPGRSLRLSCAASGFTFSSYGMHWVRQAPGKGLEWVAFIRYDGSNKYYADSVKGRFTISRDNSKNTLYLQMNSLRAEDTAVYYCKTHGSHDNWGQGTMVTVSSGGGGSGGGGSGGGGSEVQLVESGGGLVQPGNSLRLSCAASGFTFSKFGMSWVRQAPGKGLEWVSSISGSGRDTLYAESVKGRFTISRDNAKTTLYLQMNSLRPEDTAVYYCTIGGSLSVSSQGTLVTVSSHHHHHHEPEA

SEQ ID NO: 74 - protein, 328 aa, Homo sapiens
MCHQQLVISWFSLVFLASPLVAIWELKKDVYVVELDWYPDAPGEMVVLTCDTPEEDGITWTLDQSSEVLGSGKTLTIQVKEFGDAGQYTCHKGGEVLSHSLLLLHKKEDGIWSTDILKDQKEPKNKTFLRCEAKNYSGRFTCWWLTTISTDLTFSVKSSRGSSDPQGVTCGAATLSAERVRGDNKEYEYSVECQEDSACPAAEESLPIEVMVDAVHKLKYENYTSSFFIRDIIKPDPPKNLQLKPLKNSRQVEVSWEYPDTWSTPHSYFSLTFCVQVQGKSKREKKDRVFTDKTSATVICRKNASISVRAQDRYYSSSWSEWASVPCS

SEQ ID NO: 75 - protein, 215 aa, Mus musculus
MCQSRYLLFLATLALLNHLSLARVIPVSGPARCLSQSRNLLKTTDDMVKTAREKLKHYSCTAEDIDHEDITRDQTSTLKTCLPLELHKNESCLATRETSSTTRGSCLPPQKTSLMMTLCLGSIYEDLKMYQTEFQAINAALQNHNHQQIILDKGMLVAIDELMQSLNHNGETLRQKPPVGEADPYRVKMKLCILLHAFSTRVVTINRVMGYLSSA

SEQ ID NO: 76 - protein, 862 aa, Unknown
  source: /note="Description of Unknown: IL12Rb-2 sequence"
MAHTFRGCSLAFMFIITWLLIKAKIDACKRGDVTVKPSHVILLGSTVNITCSLKPRQGCFHYSRRNKLILYKFDRRINFHHGHSLNSQVTGLPLGTTLFVCKLACINSDEIQICGAEIFVGVAPEQPQNLSCIQKGEQGTVACTWERGRDTHLYTEYTLQLSGPKNLTWQKQCKDIYCDYLDFGINLTPESPESNFTAKVTAVNSLGSSSSLPSTFTFLDIVRPLPPWDIRIKFQKASVSRCTLYWRDEGLVLLNRLRYRPSNSRLWNMVNVTKAKGRHDLLDLKPFTEYEFQISSKLHLYKGSWSDWSESLRAQTPEEEPTGMLDVWYMKRHIDYSRQQISLFWKNLSVSEARGKILHYQVTLQELTGGKAMTQNITGHTSWTTVIPRTGNWAVAVSAANSKGSSLPTRINIMNLCEAGLLAPRQVSANSEGMDNILVTWQPPRKDPSAVQEYVVEWRELHPGGDTQVPLNWLRSRPYNVSALISENIKSYICYEIRVYALSGDQGGCSSILGNSKHKAPLSGPHINAITEEKGSILISWNSIPVQEQMGCLLHYRIYWKERDSNSQPQLCEIPYRVSQNSHPINSLQPRVTYVLWMTALTAAGESSHGNEREFCLQGKANWMAFVAPSICIAIIMVGIFSTHYFQQKVFVLLAALRPQWCSREIPDPANSTCAKKYPIAEEKTQLPLDRLLIDWPTPEDPEPLVISEVLHQVTPVFRHPPCSNWPQREKGIQGHQASEKDMMHSASSPPPPRALQAESRQLVDLYKVLESRGSDPKPENPACPWTVLPAGDLPTHDGYLPSNIDDLPSHEAPLADSLEELEPQHISLSVFPSSSLHPLTFSCGDKLTLDQLKMRCDSLML

SEQ ID NO: 77 - protein, 662 aa, Unknown
  source: /note="Description of Unknown: IL12Rb-1 sequence"
MEPLVTWVVPLLFLFLLSRQGAACRTSECCFQDPPYPDADSGSASGPRDLRCYRISSDRYECSWQYEGPTAGVSHFLRCCLSSGRCCYFAAGSATRLQFSDQAGVSVLYTVTLWVESWARNQTEKSPEVTLQLYNSVKYEPPLGDIKVSKLAGQLRMEWETPDNQVGAEVQFRHRTPSSPWKLGDCGPQDDDTESCLCPLEMNVAQEFQLRRRQLGSQGSSWSKWSSPVCVPPENPPQPQVRFSVEQLGQDGRRRLTLKEQPTQLELPEGCQGLAPGTEVTYRLQLHMLSCPCKAKATRTLHLGKMPYLSGAAYNVAVISSNQFGPGLNQTWHIPADTHTEPVALNISVGTNGTTMYWPARAQSMTYCIEWQPVGQDGGLATCSLTAPQDPDPAGMATYSWSRESGAMGQEKCYYITIFASAHPEKLTLWSTVLSTYHFGGNASAAGTPHHVSVKNHSLDSVSVDWAPSLLSTCPGVLKEYVVRCRDEDSKQVSEHPVQPTETQVTLSGLRAGVAYTVQVRADTAWLRGVWSQPQRFSIEVQVSDWLIFFASLGSFLSILLVGVLGYLGLNRAARHLCPPLPTPCASSAIEFPGGKETWQWINPVDFQEEASLQEALVVEMSWDKGERTEPLEKTELPEGAPELALDTELSLEDGDRCKAKM

SEQ ID NO: 78 - protein, 328 aa, Homo sapiens; identical to SEQ ID NO: 74

SEQ ID NO: 79 - protein, 335 aa, Mus musculus
MCPQKLTISWFAIVLLVSPLMAMWELEKDVYVVEVDWTPDAPGETVNLTCDTPEEDDITWTSDQRHGVIGSGKTLTITVKEFLDAGQYTCHKGGETLSHSHLLLHKKENGIWSTEILKNFKNKTFLKCEAPNYSGRFTCSWLVQRNMDLKFNIKSSSSSPDSRAVTCGMASLSAEKVTLDQRDYEKYSVSCQEDVTCPTAEETLPIELALEARQQNKYENYSTSFFIRDIIKPDPPKNLQMKPLKNSQVEVSWEYPDSWSTPHSYFSLKFFVRIQRKKEKMKETEEGCNQKGAFLVEKTSTEVQCKGGNVCVQAQDRYYNSSCSKWACVPCRVRS

SEQ ID NO: 80 - protein, 399 aa, Artificial Sequence
  source: /note="Description of Artificial Sequence: Synthetic polypeptide"
EVQLVESGGGLVQPGNSLRLSCAASGFTFSKFGMSWVRQAPGKGLEWVSSISGSGRDTLYAESVKGRFTISRDNAKTTLYLQMNSLRPEDTAVYYCTIGGSLSVSSQGTLVTVSSSGGPGPAGMKGLPGSHGTVIESLESLNNYFNSSGIDVEEKSLFLDIWRNWQKDGDMKILQSQIISFYLRLFEVLKDNQAISNNISVIESHLITTFFSNSKAKKDAFMSIAKFEVNNPQVQRQAFNELIRVVHQLLPESSLRKRKRSRCSGGPGPAGMKGLPGSEVQLVESGGGLVQPGNSLRLSCAASGFTFSKFGMSWVRQAPGKGLEWVSSISGSGRDTLYAESVKGRFTISRDNAKTTLYLQMNSLRPEDTAVYYCTIGGSLSVSSQGTLVTVSSHHHHHH

SEQ ID NO: 81 - protein, 547 aa, Artificial Sequence
  source: /note="Description of Artificial Sequence: Synthetic polypeptide"
EVQLVESGGGLVQPGNSLRLSCAASGFTFSKFGMSWVRQAPGKGLEWVSSISGSGRDTLYAESVKGRFTISRDNAKTTLYLQMNSLRPEDTAVYYCTIGGSLSVSSQGTLVTVSSSGGPGPAGMKGLPGSHGTVIESLESLNNYFNSSGIDVEEKSLFLDIWRNWQKDGDMKILQSQIISFYLRLFEVLKDNQAISNNISVIESHLITTFFSNSKAKKDAFMSIAKFEVNNPQVQRQAFNELIRVVHQLLPESSLRKRKRSRCSGGPGPAGMKGLPGSHGTVIESLESLNNYFNSSGIDVEEKSLFLDIWRNWQKDGDMKILQSQIISFYLRLFEVLKDNQAISNNISVIESHLITTFFSNSKAKKDAFMSIAKFEVNNPQVQRQAFNELIRVVHQLLPESSLRKRKRSRCSGGPGPAGMKGLPGSEVQLVESGGGLVQPGNSLRLSCAASGFTFSKFGMSWVRQAPGKGLEWVSSISGSGRDTLYAESVKGRFTISRDNAKTTLYLQMNSLRPEDTAVYYCTIGGSLSVSSQGTLVTVSSHHHHHH

SEQ ID NO: 82 - protein, 547 aa, Artificial Sequence
  source: /note="Description of Artificial Sequence: Synthetic polypeptide"
EVQLVESGGGLVQPGNSLRLSCAASGFTFSKFGMSWVRQAPGKGLEWVSSISGSGRDTLYAESVKGRFTISRDNAKTTLYLQMNSLRPEDTAVYYCTIGGSLSVSSQGTLVTVSSSGGPGPAGMKGLPGSHGTVIESLESLNNYFNSSGIDVEEKSLFLDIWRNWQKDGDMKILQSQIISFYLRLFEVLKDNQAISNNISVIESHLITTFFSNSKAKKDAFMSIAKFEVNNPQVQRQAFNELIRVVHQLLPESSLRKRKRSRCGGGGSGGGGSGGGGSHGTVIESLESLNNYFNSSGIDVEEKSLFLDIWRNWQKDGDMKILQSQIISFYLRLFEVLKDNQAISNNISVIESHLITTFFSNSKAKKDAFMSIAKFEVNNPQVQRQAFNELIRVVHQLLPESSLRKRKRSRCSGGPGPAGMKGLPGSEVQLVESGGGLVQPGNSLRLSCAASGFTFSKFGMSWVRQAPGKGLEWVSSISGSGRDTLYAESVKGRFTISRDNAKTTLYLQMNSLRPEDTAVYYCTIGGSLSVSSQGTLVTVSSHHHHHH

SEQ ID NO: 83 - protein, 166 aa, Homo sapiens
MKYTSYILAFQLCIVLGSLGCYCQDPYVKEAENLKKYFNAGHSDVADNGTLFLGILKNWKEESDRKIMQSQIVSFYFKLFKNFKDDQSIQKSVETIKEDMNVKFFNSNKKKRDDFEKLTNYSVTDLNVQRKAIHELIQVMAELSPAAKTGKRKRSQMLFRGRRASQ

SEQ ID NO: 84 - protein, 155 aa, Mus musculus
MNATHCILALQLFLMAVSGCYCHGTVIESLESLNNYFNSSGIDVEEKSLFLDIWRNWQKDGDMKILQSQIISFYLRLFEVLKDNQAISNNISVIESHLITTFFSNSKAKKDAFMSIAKFEVNNPQVQRQAFNELIRVVHQLLPESSLRKRKRSRC

SEQ ID NO: 85 - protein, 699 aa, Artificial Sequence
  source: /note="Description of Artificial Sequence: Synthetic polypeptide"
MDMRVPAQLLGLLLLWLRGARCEVQLVESGGGLVQPGNSLRLSCAASGFTFSKFGMSWVRQAPGKGLEWVSSISGSGRDTLYAESVKGRFTISRDNAKTTLYLQMNSLRPEDTAVYYCTIGGSLSVSSQGTLVTVSSSGGPGPAGMKGLPGSHGTVIESLESLNNYFNSSGIDVEEKSLFLDIWRNWQKDGDMKILQSQIISFYLRLFEVLKDNQAISNNISVIESHLITTFFSNSKAKKDAFMSIAKFEVNNPQVQRQAFNELIRVVHQLLPESSLRKRKRSRCSGGPGPAGMKGLPGSEVQLVESGGGLVQPGNSLRLSCAASGFTFSKFGMSWVRQAPGKGLEWVSSISGSGRDTLYAESVKGRFTISRDNAKTTLYLQMNSLRPEDTAVYYCTIGGSLSVSSQGTLVTVSSSGGPGPAGMKGLPGSHGTVIESLESLNNYFNSSGIDVEEKSLFLDIWRNWQKDGDMKILQSQIISFYLRLFEVLKDNQAISNNISVIESHLITTFFSNSKAKKDAFMSIAKFEVNNPQVQRQAFNELIRVVHQLLPESSLRKRKRSRCSGGPGPAGMKGLPGSEVQLVESGGGLVQPGNSLRLSCAASGFTFSKFGMSWVRQAPGKGLEWVSSISGSGRDTLYAESVKGRFTISRDNAKTTLYLQMNSLRPEDTAVYYCTIGGSLSVSSQGTLVTVSSHHHHHH

SEQ ID NO: 86 - protein, 436 aa, Artificial Sequence
  source: /note="Description of Artificial Sequence: Synthetic polypeptide"
EVQLVESGGGLVQPGNSLRLSCAASGFTFSKFGMSWVRQAPGKGLEWVSSISGSGRDTLYAESVKGRFTISRDNAKTTLYLQMNSLRPEDTAVYYCTIGGSLSVSSQGTLVTVSSSGGPGPAGMKGLPGSCDLPQTHNLRNKRALTLLVQMRRLSPLSCLKDRKDFGFPQEKVDAQQIKKAQAIPVLSELTQQILNIFTSKDSSAAWNTTLLDSFCNDLHQQLNDLQGCLMQQVGVQEFPLTQEDALLAVRKYFHRITVYLREKKHSPCAWEVVRAEVWRALSSSANVLGRLREEKSGGPGPAGMKGLPGSEVQLVESGGGLVQPGNSLRLSCAASGFTFSKFGMSWVRQAPGKGLEWVSSISGSGRDTLYAESVKGRFTISRDNAKTTLYLQMNSLRPEDTAVYYCTIGGSLSVSSQGTLVTVSSHHHHHHEPEA

SEQ ID NO: 87 - protein, 428 aa, Artificial Sequence
  source: /note="Description of Artificial Sequence: Synthetic polypeptide"
EVQLVESGGGLVQPGNSLRLSCAASGFTFSKFGMSWVRQAPGKGLEWVSSISGSGRDTLYAESVKGRFTISRDNAKTTLYLQMNSLRPEDTAVYYCTIGGSLSVSSQGTLVTVSSSGGPGPAGMKGLPGSCDLPQTHNLRNKRALTLLVQMRRLSPLSCLKDRKDFGFPQEKVDAQQIKKAQAIPVLSELTQQILNIFTSKDSSAAWNTTLLDSFCNDLHQQLNDLQGCLMQQVGVQEFPLTQEDALLAVRKYFHRITVYLREKKHSPCAWEVVRAEVWRALSSSANVSGGPGPAGMKGLPGSEVQLVESGGGLVQPGNSLRLSCAASGFTFSKFGMSWVRQAPGKGLEWVSSISGSGRDTLYAESVKGRFTISRDNAKTTLYLQMNSLRPEDTAVYYCTIGGSLSVSSQGTLVTVSSHHHHHHEPEA

SEQ ID NO: 88 - protein, 489 aa, Unknown
  source: /note="Description of Unknown: IFNgR1 sequence"
MALLFLLPLVMQGVSRAEMGTADLGPSSVPTPTNVTIESYNMNPIVYWEYQIMPQVPVFTVEVKNYGVKNSEWIDACINISHHYCNISDHVGDPSNSLWVRVKARVGQKESAYAKSEEFAVCRDGKIGPPKLDIRKEEKQIMIDIFHPSVFVNGDEQEVDYDPETTCYIRVYNVYVRMNGSEIQYKILTQKEDDCDEIQCQLAIPVSSLNSQYCVSAEGVLHVWGVTTEKSKEVCITIFNSSIKGSLWIPVVAALLLFLVLSLVFICFYIKKINPLKEKSIILPKSLISVVRSATLETKPESKYVSLITSYQPFSLEKEVVCEEPLSPATVPGMHTEDNPGKVEHTEELSSITEVVTTEENIPDVVPGSHLTPIERESSSPLSSNQSEPGSIALNSYHSRNCSESDHSRNGFDTDSSCLESHSSLSDSEFPPNNKGEIKTEGQELITVIKAPTSFGYDKPHVLVDLLVDDSGKESLIGYRPTEDSKEFS

SEQ ID NO: 89 - protein, 337 aa, Unknown
  source: /note="Description of Unknown: IFNgR2 sequence"
MRPTLLWSLLLLLGVFAAAAAAPPDPLSQLPAPQHPKIRLYNAEQVLSWEPVALSNSTRPVVYQVQFKYTDSKWFTADIMSIGVNCTQITATECDFTAASPSAGFPMDFNVTLRLRAELGALHSAWVTMPWFQHYRNVTVGPPENIEVTPGEGSLIIRFSSPFDIADTSTAFFCYYVHYWEKGGIQQVKGPFRSNSISLDNLKPSRVYCLQVQAQLLWNKSNIFRVGHLSNISCYETMADASTELQQVILISVGTFSLLSVLAGACFFLVLKYRGLIKYWFHTPPSIPLQIEEYLKDPTQPILEALDKDSSPKDDVWDSVSIISFPEKEQEDVLQTL

SEQ ID NO: 90 - protein, 528 aa, Artificial Sequence
  source: /note="Description of Artificial Sequence: Synthetic polypeptide"
QVQLQESGGGLVQAGGSLRLSCAASGRIFSIDIMSWYRQAPGKQRELVARITRGGTISYDDSVKGRFTISRDNAKNTVYLQMNSLKPEDTGVYYCNALYGTDYWGKGTQVTVSSGGGGSGGGGSGGGGSEVQLVESGGGLVQPGNSLRLSCAASGFTFSKFGMSWVRQAPGKGLEWVSSISGSGRDTLYAESVKGRFTISRDNAKTTLYLQMNSLRPEDTAVYYCTIGGSLSVSSQGTLVTVSSSGGPGPAGMKGLPGSHGTVIESLESLNNYFNSSGIDVEEKSLFLDIWRNWQKDGDMKILQSQIISFYLRLFEVLKDNQAISNNISVIESHLITTFFSNSKAKKDAFMSIAKFEVNNPQVQRQAFNELIRVVHQLLPESSLRKRKRSRCSGGPGPAGMKGLPGSEVQLVESGGGLVQPGNSLRLSCAASGFTFSKFGMSWVRQAPGKGLEWVSSISGSGRDTLYAESVKGRFTISRDNAKTTLYLQMNSLRPEDTAVYYCTIGGSLSVSSQGTLVTVSSHHHHHH

SEQ ID NO: 91 - protein, 658 aa, Artificial Sequence
  source: /note="Description of Artificial Sequence: Synthetic polypeptide"
EVQLVESGGGLVQPGNSLRLSCAASGFTFSKFGMSWVRQAPGKGLEWVSSISGSGRDTLYAESVKGRFTISRDNAKTTLYLQMNSLRPEDTAVYYCTIGGSLSVSSQGTLVTVSSSGGPGPAGMKGLPGSHGTVIESLESLNNYFNSSGIDVEEKSLFLDIWRNWQKDGDMKILQSQIISFYLRLFEVLKDNQAISNNISVIESHLITTFFSNSKAKKDAFMSIAKFEVNNPQVQRQAFNELIRVVHQLLPESSLRKRKRSRCSGGPGPAGMKGLPGSEVQLVESGGGLVQPGNSLRLSCAASGFTFSKFGMSWVRQAPGKGLEWVSSISGSGRDTLYAESVKGRFTISRDNAKTTLYLQMNSLRPEDTAVYYCTIGGSLSVSSQGTLVTVSSSGGPGPAGMKGLPGSEVQLVESGGGLVQPGNSLRLSCAASGFTFSKFGMSWVRQAPGKGLEWVSSISGSGRDTLYAESVKGRFTISRDNAKTTLYLQMNSLRPEDTAVYYCTIGGSLSVSSQGTLVTVSSGGGGSGGGGSGGGGSQVQLQESGGGLVQAGGSLRLSCAASGRIFSIDIMSWYRQAPGKQRELVARITRGGTISYDDSVKGRFTISRDNAKNTVYLQMNSLKPEDTGVYYCNALYGTDYWGKGTQVTVSSHHHHHH

SEQ ID NO: 92 - protein, 1337 aa, Artificial Sequence
  source: /note="Description of Artificial Sequence: Synthetic polypeptide"
EAHKSEIAHRYNDLGEQHFKGLVLIAFSQYLQKCSYDEHAKLVQEVTDFAKTCVADESAANCDKSLHTLFGDKLCAIPNLRENYGELADCCTKQEPERNECFLQHKDDNPSLPPFERPEAEAMCTSFKENPTTFMGHYLHEVARRHPYFYAPELLYYAEQYNEILTQCCAEADKESCLTPKLDGVKEKALVSSVRQRMKCSSMQKFGERAFKAWAVARLSQTFPNADFAEITKLATDLTKVNKECCHGDLLECADDRAELAKYMCENQATISSKLQTCCDKPLLKKAHCLSEVEHDTMPADLPAIAADFVEDQEVCKNYAEAKDVFLGTFLYEYSRRHPDYSVSLLLRLAKKYEATLEKCCAEANPPACYGTVLAEFQPLVEEPKNLVKTNCDLYEKLGEYGFQNAILVRYTQKAPQVSTPTLVEAARNLGRVGTKCCTLPEDQRLPCVEDYLSAILNRVCLLHEKTPVSEHVTKCCSGSLVERRPCFSALTVDETYVPKEFKAETFTFHSDICTLPEKEKQIKKQTALAELVKHKPKATAEQLKTVMDDFAQFLDTCCKAADKDTCFSTEGPNLVTRCKDALASGGPGPAGMKGLPGSHGTVIESLESLNNYFNSSGIDVEEKSLFLDIWRNWQKDGDMKILQSQIISFYLRLFEVLKDNQAISNNISVIESHLITTFFSNSKAKKDAFMSIAKFEVNNPQVQRQAFNELIRVVHQLLPESSLRKRKRSRCSGGPGPAGMKGLPGSEAHKSEIAHRYNDLGEQHFKGLVLIAFSQYLQKCSYDEHAKLVQEVTDFAKTCVADESAANCDKSLHTLFGDKLCAIPNLRENYGELADCCTKQEPERNECFLQHKDDNPSLPPFERPEAEAMCTSFKENPTTFMGHYLHEVARRHPYFYAPELLYYAEQYNEILTQCCAEADKESCLTPKLDGVKEKALVSSVRQRMKCSSMQKFGERAFKAWAVARLSQTFPNADFAEITKLATDLTKVNKECCHGDLLECADDRAELAKYMCENQATISSKLQTCCDKPLLKKAHCLSEVEHDTMPADLPAIAADFVEDQEVCKNYAEAKDVFLGTFLYEYSRRHPDYSVSLLLRLAKKYEATLEKCCAEANPPACYGTVLAEFQPLVEEPKNLVKTNCDLYEKLGEYGFQNAILVRYTQKAPQVSTPTLVEAARNLGRVGTKCCTLPEDQRLPCVEDYLSAILNRVCLLHEKTPVSEHVTKCCSGSLVERRPCFSALTVDETYVPKEFKAETFTFHSDICTLPEKEKQIKKQTALAELVKHKPKATAEQLKTVMDDFAQFLDTCCKAADKDTCFSTEGPNLVTRCKDALAHHHHHH

SEQ ID NO: 93 - protein, 1485 aa, Artificial Sequence
  source: /note="Description of Artificial Sequence: Synthetic polypeptide"
EAHKSEIAHRYNDLGEQHFKGLVLIAFSQYLQKCSYDEHAKLVQEVTDFAKTCVADESAANCDKSLHTLFGDKLCAIPNLRENYGELADCCTKQEPERNECFLQHKDDNPSLPPFERPEAEAMCTSFKENPTTFMGHYLHEVARRHPYFYAPELLYYAEQYNEILTQCCAEADKESCLTPKLDGVKEKALVSSVRQRMKCSSMQKFGERAFKAWAVARLSQTFPNADFAEITKLATDLTKVNKECCHGDLLECADDRAELAKYMCENQATISSKLQTCCDKPLLKKAHCLSEVEHDTMPADLPAIAADFVEDQEVCKNYAEAKDVFLGTFLYEYSRRHPDYSVSLLLRLAKKYEATLEKCCAEANPPACYGTVLAEFQPLVEEPKNLVKTNCDLYEKLGEYGFQNAILVRYTQKAPQVSTPTLVEAARNLGRVGTKCCTLPEDQRLPCVEDYLSAILNRVCLLHEKTPVSEHVTKCCSGSLVERRPCFSALTVDETYVPKEFKAETFTFHSDICTLPEKEKQIKKQTALAELVKHKPKATAEQLKTVMDDFAQFLDTCCKAADKDTCFSTEGPNLVTRCKDALASGGPGPAGMKGLPGSHGTVIESLESLNNYFNSSGIDVEEKSLFLDIWRNWQKDGDMKILQSQIISFYLRLFEVLKDNQAISNNISVIESHLITTFFSNSKAKKDAFMSIAKFEVNNPQVQRQAFNELIRVVHQLLPESSLRKRKRSRCGGGGSGGGGSGGGGSHGTVIESLESLNNYFNSSGIDVEEKSLFLDIWRNWQKDGDMKILQSQIISFYLRLFEVLKDNQAISNNISVIESHLITTFFSNSKAKKDAFMSIAKFEVNNPQVQRQAFNELIRVVHQLLPESSLRKRKRSRCSGGPGPAGMKGLPGSEAHKSEIAHRYNDLGEQHFKGLVLIAFSQYLQKCSYDEHAKLVQEVTDFAKTCVADESAANCDKSLHTLFGDKLCAIPNLRENYGELADCCTKQEPERNECFLQHKDDNPSLPPFERPEAEAMCTSFKENPTTFMGHYLHEVARRHPYFYAPELLYYAEQYNEILTQCCAEADKESCLTPKLDGVKEKALVSSVRQRMKCSSMQKFGERAFKAWAVARLSQTFPNADFAEITKLATDLTKVNKECCHGDLLECADDRAELAKYMCENQATISSKLQTCCDKPLLKKAHCLSEVEHDTMPADLPAIAADFVEDQEVCKNYAEAKDVFLGTFLYEYSRRHPDYSVSLLLRLAKKYEATLEKCCAEANPPACYGTVLAEFQPLVEEPKNLVKTNCDLYEKLGEYGFQNAILVRYTQKAPQVSTPTLVEAARNLGRVGTKCCTLPEDQRLPCVEDYLSAILNRVCLLHEKTPVSEHVTKCCSGSLVERRPCFSALTVDETYVPKEFKAETFTFHSDICTLPEKEKQIKKQTALAELVKHKPKATAEQLKTVMDDFAQFLDTCCKAADKDTCFSTEGPNLVTRCKDALAHHHHHH

SEQ ID NO: 94 - protein, 698 aa, Artificial Sequence
  source: /note="Description of Artificial Sequence: Synthetic polypeptide"
MDMRVPAQLLGLLLLWLRGARCQVQLQESGGGLVQAGGSLRLSCAASGRIFSIDIMSWYRQAPGKQRELVARITRGGTISYDDSVKGRFTISRDNAKNTVYLQMNSLKPEDTGVYYCNALYGTDYWGKGTQVTVSSGGGGSGGGGSGGGGSEVQLVESGGGLVQPGNSLRLSCAASGFTFSKFGMSWVRQAPGKGLEWVSSISGSGRDTLYAESVKGRFTISRDNAKTTLYLQMNSLRPEDTAVYYCTIGGSLSVSSQGTLVTVSSSGGPGPAGMKGLPGSHGTVIESLESLNNYFNSSGIDVEEKSLFLDIWRNWQKDGDMKILQSQIISFYLRLFEVLKDNQAISNNISVIESHLITTFFSNSKAKKDAFMSIAKFEVNNPQVQRQAFNELIRVVHQLLPESSLRKRKRSRCGGGGSGGGGSGGGGSHGTVIESLESLNNYFNSSGIDVEEKSLFLDIWRNWQKDGDMKILQSQIISFYLRLFEVLKDNQAISNNISVIESHLITTFFSNSKAKKDAFMSIAKFEVNNPQVQRQAFNELIRVVHQLLPESSLRKRKRSRCSGGPGPAGMKGLPGSEVQLVESGGGLVQPGNSLRLSCAASGFTFSKFGMSWVRQAPGKGLEWVSSISGSGRDTLYAESVKGRFTISRDNAKTTLYLQMNSLRPEDTAVYYCTIGGSLSVSSQGTLVTVSSHHHHHH

SEQ ID NO: 95 - protein, 699 aa, Artificial Sequence; identical to SEQ ID NO: 85
  source: /note="Description of Artificial Sequence: Synthetic polypeptide"

SEQ ID NO: 96 - protein, 554 aa, Artificial Sequence
  source: /note="Description of Artificial Sequence: Synthetic polypeptide"
MDMRVPAQLLGLLLLWLRGARCQVQLQESGGGLAQAGGSLSLSCAASGFTVSNSVMAWYRQTPGKQREFVAIINSVGSTNYADSVKGRFTISRDNAKNTVYLQMNNLKPEDTAVYVCNRNFDRIYWGQGTQVTVSSGGGGSGGGGSGGGGSEVQLVESGGGLVQPGNSLRLSCAASGFTFSKFGMSWVRQAPGKGLEWVSSISGSGRDTLYAESVKGRFTISRDNAKTTLYLQMNSLRPEDTAVYYCTIGGSLSVSSQGTLVTVSSSGGPGPAGMKGLPGSHGTVIESLESLNNYFNSSGIDVEEKSLFLDIWRNWQKDGDMKILQSQIISFYLRLFEVLKDNQAISNNISVIESHLITTFFSNSKAKKDAFMSIAKFEVNNPQVQRQAFNELIRVVHQLLPESSLRKRKRSRCSGGPGPAGMKGLPGSEVQLVESGGGLVQPGNSLRLSCAASGFTFSKFGMSWVRQAPGKGLEWVSSISGSGRDTLYAESVKGRFTISRDNAKTTLYLQMNSLRPEDTAVYYCTIGGSLSVSSQGTLVTVSSHHHHHHEPEA

SEQ ID NO: 97 - protein, 554 aa, Artificial Sequence
  source: /note="Description of Artificial Sequence: Synthetic polypeptide"
MDMRVPAQLLGLLLLWLRGARCEVQLVESGGGLVQPGNSLRLSCAASGFTFSKFGMSWVRQAPGKGLEWVSSISGSGRDTLYAESVKGRFTISRDNAKTTLYLQMNSLRPEDTAVYYCTIGGSLSVSSQGTLVTVSSSGGPGPAGMKGLPGSHGTVIESLESLNNYFNSSGIDVEEKSLFLDIWRNWQKDGDMKILQSQIISFYLRLFEVLKDNQAISNNISVIESHLITTFFSNSKAKKDAFMSIAKFEVNNPQVQRQAFNELIRVVHQLLPESSLRKRKRSRCSGGPGPAGMKGLPGSEVQLVESGGGLVQPGNSLRLSCAASGFTFSKFGMSWVRQAPGKGLEWVSSISGSGRDTLYAESVKGRFTISRDNAKTTLYLQMNSLRPEDTAVYYCTIGGSLSVSSQGTLVTVSSGGGGSGGGGSGGGGSQVQLQESGGGLAQAGGSLSLSCAASGFTVSNSVMAWYRQTPGKQREFVAIINSVGSTNYADSVKGRFTISRDNAKNTVYLQMNNLKPEDTAVYVCNRNFDRIYWGQGTQVTVSSHHHHHHEPEA

SEQ ID NO: 98 - protein, 702 aa, Artificial Sequence
  source: /note="Description of Artificial Sequence: Synthetic polypeptide"
MDMRVPAQLLGLLLLWLRGARCEVQLVESGGGLVQPGNSLRLSCAASGFTFSKFGMSWVRQAPGKGLEWVSSISGSGRDTLYAESVKGRFTISRDNAKTTLYLQMNSLRPEDTAVYYCTIGGSLSVSSQGTLVTVSSSGGPGPAGMKGLPGSHGTVIESLESLNNYFNSSGIDVEEKSLFLDIWRNWQKDGDMKILQSQIISFYLRLFEVLKDNQAISNNISVIESHLITTFFSNSKAKKDAFMSIAKFEVNNPQVQRQAFNELIRVVHQLLPESSLRKRKRSRCSGGPGPAGMKGLPGSHGTVIESLESLNNYFNSSGIDVEEKSLFLDIWRNWQKDGDMKILQSQIISFYLRLFEVLKDNQAISNNISVIESHLITTFFSNSKAKKDAFMSIAKFEVNNPQVQRQAFNELIRVVHQLLPESSLRKRKRSRCSGGPGPAGMKGLPGSEVQLVESGGGLVQPGNSLRLSCAASGFTFSKFGMSWVRQAPGKGLEWVSSISGSGRDTLYAESVKGRFTISRDNAKTTLYLQMNSLRPEDTAVYYCTIGGSLSVSSQGTLVTVSSGGGGSGGGGSGGGGSQVQLQESGGGLVQAGGSLRLSCAASGRIFSIDIMSWYRQAPGKQRELVARITRGGTISYDDSVKGRFTISRDNAKNTVYLQMNSLKPEDTGVYYCNALYGTDYWGKGTQVTVSSHHHHHHEPEA

SEQ ID NO: 99 - protein, 702 aa, Artificial Sequence
  source: /note="Description of Artificial Sequence: Synthetic polypeptide"
MDMRVPAQLLGLLLLWLRGARCQVQLQESGGGLAQAGGSLSLSCAASGFTVSNSVMAWYRQTPGKQREFVAIINSVGSTNYADSVKGRFTISRDNAKNTVYLQMNNLKPEDTAVYVCNRNFDRIYWGQGTQVTVSSGGGGSGGGGSGGGGSEVQLVESGGGLVQPGNSLRLSCAASGFTFSKFGMSWVRQAPGKGLEWVSSISGSGRDTLYAESVKGRFTISRDNAKTTLYLQMNSLRPEDTAVYYCTIGGSLSVSSQGTLVTVSSSGGPGPAGMKGLPGSHGTVIESLESLNNYFNSSGIDVEEKSLFLDIWRNWQKDGDMKILQSQIISFYLRLFEVLKDNQAISNNISVIESHLITTFFSNSKAKKDAFMSIAKFEVNNPQVQRQAFNELIRVVHQLLPESSLRKRKRSRCSGGPGPAGMKGLPGSHGTVIESLESLNNYFNSSGIDVEEKSLFLDIWRNWQKDGDMKILQSQIISFYLRLFEVLKDNQAISNNISVIESHLITTFFSNSKAKKDAFMSIAKFEVNNPQVQRQAFNELIRVVHQLLPESSLRKRKRSRCSGGPGPAGMKGLPGSEVQLVESGGGLVQPGNSLRLSCAASGFTFSKFGMSWVRQAPGKGLEWVSSISGSGRDTLYAESVKGRFTISRDNAKTTLYLQMNSLRPEDTAVYYCTIGGSLSVSSQGTLVTVSSHHHHHHEPEA

SEQ ID NO: 100 - protein, 702 aa, Artificial Sequence
  source: /note="Description of Artificial Sequence: Synthetic polypeptide"
MDMRVPAQLLGLLLLWLRGARCEVQLVESGGGLVQPGNSLRLSCAASGFTFSKFGMSWVRQAPGKGLEWVSSISGSGRDTLYAESVKGRFTISRDNAKTTLYLQMNSLRPEDTAVYYCTIGGSLSVSSQGTLVTVSSSGGPGPAGMKGLPGSHGTVIESLESLNNYFNSSGIDVEEKSLFLDIWRNWQKDGDMKILQSQIISFYLRLFEVLKDNQAISNNISVIESHLITTFFSNSKAKKDAFMSIAKFEVNNPQVQRQAFNELIRVVHQLLPESSLRKRKRSRCSGGPGPAGMKGLPGSHGTVIESLESLNNYFNSSGIDVEEKSLFLDIWRNWQKDGDMKILQSQIISFYLRLFEVLKDNQAISNNISVIESHLITTFFSNSKAKKDAFMSIAKFEVNNPQVQRQAFNELIRVVHQLLPESSLRKRKRSRCSGGPGPAGMKGLPGSEVQLVESGGGLVQPGNSLRLSCAASGFTFSKFGMSWVRQAPGKGLEWVSSISGSGRDTLYAESVKGRFTISRDNAKTTLYLQMNSLRPEDTAVYYCTIGGSLSVSSQGTLVTVSSGGGGSGGGGSGGGGSQVQLQESGGGLAQAGGSLSLSCAASGFTVSNSVMAWYRQTPGKQREFVAIINSVGSTNYADSVKGRFTISRDNAKNTVYLQMNNLKPEDTAVYVCNRNFDRIYWGQGTQVTVSSHHHHHHEPEA

SEQ ID NO: 101 - protein, 832 aa, Artificial Sequence
  source: /note="Description of Artificial Sequence: Synthetic polypeptide"
MDMRVPAQLLGLLLLWLRGARCEVQLVESGGGLVQPGNSLRLSCAASGFTFSKFGMSWVRQAPGKGLEWVSSISGSGRDTLYAESVKGRFTISRDNAKTTLYLQMNSLRPEDTAVYYCTIGGSLSVSSQGTLVTVSSSGGPGPAGMKGLPGSHGTVIESLESLNNYFNSSGIDVEEKSLFLDIWRNWQKDGDMKILQSQIISFYLRLFEVLKDNQAISNNISVIESHLITTFFSNSKAKKDAFMSIAKFEVNNPQVQRQAFNELIRVVHQLLPESSLRKRKRSRCSGGPGPAGMKGLPGSHGTVIESLESLNNYFNSSGIDVEEKSLFLDIWRNWQKDGDMKILQSQIISFYLRLFEVLKDNQAISNNISVIESHLITTFFSNSKAKKDAFMSIAKFEVNNPQVQRQAFNELIRVVHQLLPESSLRKRKRSRCSGGPGPAGMKGLPGSEVQLVESGGGLVQPGNSLRLSCAASGFTFSKFGMSWVRQAPGKGLEWVSSISGSGRDTLYAESVKGRFTISRDNAKTTLYLQMNSLRPEDTAVYYCTIGGSLSVSSQGTLVTVSSGGGGSGGGGSGGGGSEVQLVESGGGLVQPGGSLRLSCAASGFTFSSYAMSWVRQAPGKGLEWVSAISGSGGSTYYADSVKGRFTISRDNSKNTLYLQMNSLRAEDTAVYYCARGVGAFRPYRKHEWGQGTLVTVSRGGGGSGGGGSGGGGSSSELTQDPAVSVALGQTVRITCQGDSLRSYYASWYQQKPGQAPVLVIYGKNNRPSGIPDRFSGSSSGNTASLTTTGAQAEDEADYYCNSSPFEHNLVVFGGGTKLTVLHHHHHHEPEA

SEQ ID NO: 102 - protein, 276 aa, Artificial Sequence
  source: /note="Description of Artificial Sequence: Synthetic polypeptide"
MDMRVPAQLLGLLLLWLRGARCEVQLVESGGGLVQPGGSLRLSCAASGFTFSSYAMSWVRQAPGKGLEWVSAISGSGGSTYYADSVKGRFTISRDNSKNTLYLQMNSLRAEDTAVYYCARGVGAFRPYRKHEWGQGTLVTVSRGGGGSGGGGSGGGGSSSELTQDPAVSVALGQTVRITCQGDSLRSYYASWYQQKPGQAPVLVIYGKNNRPSGIPDRFSGSSSGNTASLTTTGAQAEDEADYYCNSSPFEHNLVVFGGGTKLTVLHHHHHHEPEA

SEQ ID NO: 103 - protein, 573 aa, Artificial Sequence
  source: /note="Description of Artificial Sequence: Synthetic polypeptide"
MDMRVPAQLLGLLLLWLRGARCEVQLVESGGGLVQPGNSLRLSCAASGFTFSKFGMSWVRQAPGKGLEWVSSISGSGRDTLYAESVKGRFTISRDNAKTTLYLQMNSLRPEDTAVYYCTIGGSLSVSSQGTLVTVSSSGGPGPAGMKGLPGSHGTVIESLESLNNYFNSSGIDVEEKSLFLDIWRNWQKDGDMKILQSQIISFYLRLFEVLKDNQAISNNISVIESHLITTFFSNSKAKKDAFMSIAKFEVNNPQVQRQAFNELIRVVHQLLPESSLRKRKRSRCSGGPGPAGMKGLPGSEVQLVESGGGLVQPGNSLRLSCAASGFTFSKFGMSWVRQAPGKGLEWVSSISGSGRDTLYAESVKGRFTISRDNAKTTLYLQMNSLRPEDTAVYYCTIGGSLSVSSQGTLVTVSSSGGPGPAGMKGLPGSHGTVIESLESLNNYFNSSGIDVEEKSLFLDIWRNWQKDGDMKILQSQIISFYLRLFEVLKDNQAISNNISVIESHLITTFFSNSKAKKDAFMSIAKFEVNNPQVQRQAFNELIRVVHQLLPESSLRKRKRSRCHHHHHHEPEA

SEQ ID NO: 104 - protein, 573 aa, Artificial Sequence
  source: /note="Description of Artificial Sequence: Synthetic polypeptide"
MDMRVPAQLLGLLLLWLRGARCHGTVIESLESLNNYFNSSGIDVEEKSLFLDIWRNWQKDGDMKILQSQIISFYLRLFEVLKDNQAISNNISVIESHLITTFFSNSKAKKDAFMSIAKFEVNNPQVQRQAFNELIRVVHQLLPESSLRKRKRSRCSGGPGPAGMKGLPGSEVQLVESGGGLVQPGNSLRLSCAASGFTFSKFGMSWVRQAPGKGLEWVSSISGSGRDTLYAESVKGRFTISRDNAKTTLYLQMNSLRPEDTAVYYCTIGGSLSVSSQGTLVTVSSSGGPGPAGMKGLPGSHGTVIESLESLNNYFNSSGIDVEEKSLFLDIWRNWQKDGDMKILQSQIISFYLRLFEVLKDNQAISNNISVIESHLITTFFSNSKAKKDAFMSIAKFEVNNPQVQRQAFNELIRVVHQLLPESSLRKRKRSRCSGGPGPAGMKGLPGSEVQLVESGGGLVQPGNSLRLSCAASGFTFSKFGMSWVRQAPGKGLEWVSSISGSGRDTLYAESVKGRFTISRDNAKTTLYLQMNSLRPEDTAVYYCTIGGSLSVSSQGTLVTVSSHHHHHHEPEA

SEQ ID NO: 105 - protein, 1511 aa, Artificial Sequence
  source: /note="Description of Artificial Sequence: Synthetic polypeptide"
MDMRVPAQLLGLLLLWLRGARCHGTVIESLESLNNYFNSSGIDVEEKSLFLDIWRNWQKDGDMKILQSQIISFYLRLFEVLKDNQAISNNISVIESHLITTFFSNSKAKKDAFMSIAKFEVNNPQVQRQAFNELIRVVHQLLPESSLRKRKRSRCSGGPGPAGMKGLPGSEAHKSEIAHRYNDLGEQHFKGLVLIAFSQYLQKCSYDEHAKLVQEVTDFAKTCVADESAANCDKSLHTLFGDKLCAIPNLRENYGELADCCTKQEPERNECFLQHKDDNPSLPPFERPEAEAMCTSFKENPTTFMGHYLHEVARRHPYFYAPELLYYAEQYNEILTQCCAEADKESCLTPKLDGVKEKALVSSVRQRMKCSSMQKFGERAFKAWAVARLSQTFPNADFAEITKLATDLTKVNKECCHGDLLECADDRAELAKYMCENQATISSKLQTCCDKPLLKKAHCLSEVEHDTMPADLPAIAADFVEDQEVCKNYAEAKDVFLGTFLYEYSRRHPDYSVSLLLRLAKKYEATLEKCCAEANPPACYGTVLAEFQPLVEEPKNLVKTNCDLYEKLGEYGFQNAILVRYTQKAPQVSTPTLVEAARNLGRVGTKCCTLPEDQRLPCVEDYLSAILNRVCLLHEKTPVSEHVTKCCSGSLVERRPCFSALTVDETYVPKEFKAETFTFHSDICTLPEKEKQIKKQTALAELVKHKPKATAEQLKTVMDDFAQFLDTCCKAADKDTCFSTEGPNLVTRCKDALASGGPGPAGMKGLPGSHGTVIESLESLNNYFNSSGIDVEEKSLFLDIWRNWQKDGDMKILQSQIISFYLRLFEVLKDNQAISNNISVIESHLITTFFSNSKAKKDAFMSIAKFEVNNPQVQRQAFNELIRVVHQLLPESSLRKRKRSRCSGGPGPAGMKGLPGSEAHKSEIAHRYNDLGEQHFKGLVLIAFSQYLQKCSYDEHAKLVQEVTDFAKTCVADESAANCDKSLHTLFGDKLCAIPNLRENYGELADCCTKQEPERNECFLQHKDDNPSLPPFERPEAEAMCTSFKENPTTFMGHYLHEVARRHPYFYAPELLYYAEQYNEILTQCCAEADKESCLTPKLDGVKEKALVSSVRQRMKCSSMQKFGERAFKAWAVARLSQTFPNADFAEITKLATDLTKVNKECCHGDLLECADDRAELAKYMCENQATISSKLQTCCDKPLLKKAHCLSEVEHDTMPADLPAIAADFVEDQEVCKNYAEAKDVFLGTFLYEYSRRHPDYSVSLLLRLAKKYEATLEKCCAEANPPACYGTVLAEFQPLVEEPKNLVKTNCDLYEKLGEYGFQNAILVRYTQKAPQVSTPTLVEAARNLGRVGTKCCTLPEDQRLPCVEDYLSAILNRVCLLHEKTPVSEHVTKCCSGSLVERRPCFSALTVDETYVPKEFKAETFTFHSDICTLPEKEKQIKKQTALAELVKHKPKATAEQLKTVMDDFAQFLDTCCKAADKDTCFSTEGPNLVTRCKDALAHHHHHHEPEA

SEQ ID NO: 106 - protein, 1511 aa, Artificial Sequence
  source: /note="Description of Artificial Sequence: Synthetic polypeptide"
MDMRVPAQLLGLLLLWLRGARCEAHKSEIAHRYNDLGEQHFKGLVLIAFSQYLQKCSYDEHAKLVQEVTDFAKTCVADESAANCDKSLHTLFGDKLCAIPNLRENYGELADCCTKQEPERNECFLQHKDDNPSLPPFERPEAEAMCTSFKENPTTFMGHYLHEVARRHPYFYAPELLYYAEQYNEILTQCCAEADKESCLTPKLDGVKEKALVSSVRQRMKCSSMQKFGERAFKAWAVARLSQTFPNADFAEITKLATDLTKVNKECCHGDLLECADDRAELAKYMCENQATISSKLQTCCDKPLLKKAHCLSEVEHDTMPADLPAIAADFVEDQEVCKNYAEAKDVFLGTFLYEYSRRHPDYSVSLLLRLAKKYEATLEKCCAEANPPACYGTVLAEFQPLVEEPKNLVKTNCDLYEKLGEYGFQNAILVRYTQKAPQVSTPTLVEAARNLGRVGTKCCTLPEDQRLPCVEDYLSAILNRVCLLHEKTPVSEHVTKCCSGSLVERRPCFSALTVDETYVPKEFKAETFTFHSDICTLPEKEKQIKKQTALAELVKHKPKATAEQLKTVMDDFAQFLDTCCKAADKDTCFSTEGPNLVTRCKDALASGGPGPAGMKGLPGSHGTVIESLESLNNYFNSSGIDVEEKSLFLDIWRNWQKDGDMKILQSQIISFYLRLFEVLKDNQAISNNISVIESHLITTFFSNSKAKKDAFMSIAKFEVNNPQVQRQAFNELIRVVHQLLPESSLRKRKRSRCSGGPGPAGMKGLPGSEAHKSEIAHRYNDLGEQHFKGLVLIAFSQYLQKCSYDEHAKLVQEVTDFAKTCVADESAANCDKSLHTLFGDKLCAIPNLRENYGELADCCTKQEPERNECFLQHKDDNPSLPPFERPEAEAMCTSFKENPTTFMGHYLHEVARRHPYFYAPELLYYAEQYNEILTQCCAEADKESCLTPKLDGVKEKALVSSVRQRMKCSSMQKFGERAFKAWAVARLSQTFPNADFAEITKLATDLTKVNKECCHGDLLECADDRAELAKYMCENQATISSKLQTCCDKPLLKKAHCLSEVEHDTMPADLPAIAADFVEDQEVCKNYAEAKDVFLGTFLYEYSRRHPDYSVSLLLRLAKKYEATLEKCCAEANPPACYGTVLAEFQPLVEEPKNLVKTNCDLYEKLGEYGFQNAILVRYTQKAPQVSTPTLVEAARNLGRVGTKCCTLPEDQRLPCVEDYLSAILNRVCLLHEKTPVSEHVTKCCSGSLVERRPCFSALTVDETYVPKEFKAETFTFHSDICTLPEKEKQIKKQTALAELVKHKPKATAEQLKTVMDDFAQFLDTCCKAADKDTCFSTEGPNLVTRCKDALASGGPGPAGMKGLPGSHGTVIESLESLNNYFNSSGIDVEEKSLFLDIWRNWQKDGDMKILQSQIISFYLRLFEVLKDNQAISNNISVIESHLITTFFSNSKAKKDAFMSIAKFEVNNPQVQRQAFNELIRVVHQLLPESSLRKRKRSRCHHHHHHEPEA

SEQ ID NO: 107 - protein, 2110 aa, Artificial Sequence
  source: /note="Description of Artificial Sequence: Synthetic polypeptide"
MDMRVPAQLLGLLLLWLRGARCEAHKSEIAHRYNDLGEQHFKGLVLIAFSQYLQKCSYDEHAKLVQEVTDFAKTCVADESAANCDKSLHTLFGDKLCAIPNLRENYGELADCCTKQEPERNECFLQHKDDNPSLPPFERPEAEAMCTSFKENPTTFMGHYLHEVARRHPYFYAPELLYYAEQYNEILTQCCAEADKESCLTPKLDGVKEKALVSSVRQRMKCSSMQKFGERAFKAWAVARLSQTFPNADFAEITKLATDLTKVNKECCHGDLLECADDRAELAKYMCENQATISSKLQTCCDKPLLKKAHCLSEVEHDTMPADLPAIAADFVEDQEVCKNYAEAKDVFLGTFLYEYSRRHPDYSVSLLLRLAKKYEATLEKCCAEANPPACYGTVLAEFQPLVEEPKNLVKTNCDLYEKLGEYGFQNAILVRYTQKAPQVSTPTLVEAARNLGRVGTKCCTLPEDQRLPCVEDYLSAILNRVCLLHEKTPVSEHVTKCCSGSLVERRPCFSALTVDETYVPKEFKAETFTFHSDICTLPEKEKQIKKQTALAELVKHKPKATAEQLKTVMDDFAQFLDTCCKAADKDTCFSTEGPNLVTRCKDALASGGPGPAGMKGLPGSHGTVIESLESLNNYFNSSGIDVEEKSLFLDIWRNWQKDGDMKILQSQIISFYLRLFEVLKDNQAISNNISVIESHLITTFFSNSKAKKDAFMSIAKFEVNNPQVQRQAFNELIRVVHQLLPESSLRKRKRSRCSGGPGPAGMKGLPGSEAHKSEIAHRYNDLGEQHFKGLVLIAFSQYLQKCSYDEHAKLVQEVTDFAKTCVADESAANCDKSLHTLFGDKLCAIPNLRENYGELADCCTKQEPERNECFLQHKDDNPSLPPFERPEAEAMCTSFKENPTTFMGHYLHEVARRHPYFYAPELLYYAEQYNEILTQCCAEADKESCLTPKLDGVKEKALVSSVRQRMKCSSMQKFGERAFKAWAVARLSQTFPNADFAEITKLATDLTKVNKECCHGDLLECADDRAELAKYMCENQATISSKLQTCCDKPLLKKAHCLSEVEHDTMPADLPAIAADFVEDQEVCKNYAEAKDVFLGTFLYEYSRRHPDYSVSLLLRLAKKYEATLEKCCAEANPPACYGTVLAEFQPLVEEPKNLVKTNCDLYEKLGEYGFQNAILVRYTQKAPQVSTPTLVEAARNLGRVGTKCCTLPEDQRLPCVEDYLSAILNRVCLLHEKTPVSEHVTKCCSGSLVERRPCFSALTVDETYVPKEFKAETFTFHSDICTLPEKEKQIKKQTALAELVKHKPKATAEQLKTVMDDFAQFLDTCCKAADKDTCFSTEGPNLVTRCKDALASGGPGPAGMKGLPGSHGTVIESLESLNNYFNSSGIDVEEKSLFLDIWRNWQKDGDMKILQSQIISFYLRLFEVLKDNQAISNNISVIESHLITTFFSNSKAKKDAFMSIAKFEVNNPQVQRQAFNELIRVVHQLLPESSLRKRKRSRCSGGPGPAGMKGLPGSEAHKSEIAHRYNDLGEQHFKGLVLIAFSQYLQKCSYDEHAKLVQEVTDFAKTCVADESAANCDKSLHTLFGDKLCAIPNLRENYGELADCCTKQEPERNECFLQHKDDNPSLPPFERPEAEAMCTSFKENPTTFMGHYLHEVARRHPYFYAPELLYYAEQYNEILTQCCAEADKESCLTPKLDGVKEKALVSSVRQRMKCSSMQKFGERAFKAWAVARLSQTFPNADFAEITKLATDLTKVNKECCHGDLLECADDRAELAKYMCENQATISSKLQTCCDKPLLKKAHCLSEVEHDTMPADLPAIAADFVEDQEVCKNYAEAKDVFLGTFLYEYSRRHPDYSVSLLLRLAKKYEATLEKCCAEANPPACYGTVLAEFQPLVEEPKNLVKTNCDLYEKLGEYGFQNAILVRYTQKAPQVSTPTLVEAARNLGRVGTKCCTLPEDQRLPCVEDYLSAILNRVCLLHEKTPVSEHVTKCCSGSLVERRPCFSALTVDETYVPKEFKAETFTFHSDICTLPEKEKQIKKQTALAELVKHKPKATAEQLKTVMDDFAQFLDTCCKAADKDTCFSTEGPNLVTRCKDALAHHHHHHEPEA

SEQ ID NO: 108 - protein, 2120 aa, Artificial Sequence
  source: /note="Description of Artificial Sequence: Synthetic polypeptide"
MDMRVPAQLLGLLLLWLRGARCEAHKSEIAHRYNDLGEQHFKGLVLIAFSQYLQKCSYDEHAKLVQEVTDFAKTCVADESAANCDKSLHTLFGDKLCAIPNLRENYGELADCCTKQEPERNECFLQHKDDNPSLPPFERPEAEAMCTSFKENPTTFMGHYLHEVARRHPYFYAPELLYYAEQYNEILTQCCAEADKESCLTPKLDGVKEKALVSSVRQRMKCSSMQKFGERAFKAWAVARLSQTFPNADFAEITKLATDLTKVNKECCHGDLLECADDRAELAKYMCENQATISSKLQTCCDKPLLKKAHCLSEVEHDTMPADLPAIAADFVEDQEVCKNYAEAKDVFLGTFLYEYSRRHPDYSVSLLLRLAKKYEATLEKCCAEANPPACYGTVLAEFQPLVEEPKNLVKTNCDLYEKLGEYGFQNAILVRYTQKAPQVSTPTLVEAARNLGRVGTKCCTLPEDQRLPCVEDYLSAILNRVCLLHEKTPVSEHVTKCCSGSLVERRPCFSALTVDETYVPKEFKAETFTFHSDICTLPEKEKQIKKQTALAELVKHKPKATAEQLKTVMDDFAQFLDTCCKAADKDTCFSTEGPNLVTRCKDALASGGPGPAGMKGLPGSHGTVIESLESLNNYFNSSGIDVEEKSLFLDIWRNWQKDGDMKILQSQIISFYLRLFEVLKDNQAISNNISVIESHLITTFFSNSKAKKDAFMSIAKFEVNNPQVQRQAFNELIRVVHQLLPESSLRKRKRSRCSGGPGPAGMKGLPGSGGGGSEAHKSEIAHRYNDLGEQHFKGLVLIAFSQYLQKCSYDEHAKLVQEVTDFAKTCVADESAANCDKSLHTLFGDKLCAIPNLRENYGELADCCTKQEPERNECFLQHKDDNPSLPPFERPEAEAMCTSFKENPTTFMGHYLHEVARRHPYFYAPELLYYAEQYNEILTQCCAEADKESCLTPKLDGVKEKALVSSVRQRMKCSSMQKFGERAFKAWAVARLSQTFPNADFAEITKLATDLTKVNKECCHGDLLECADDRAELAKYMCENQATISSKLQTCCDKPLLKKAHCLSEVEHDTMPADLPAIAADFVEDQEVCKNYAEAKDVFLGTFLYEYSRRHPDYSVSLLLRLAKKYEATLEKCCAEANPPACYGTVLAEFQPLVEEPKNLVKTNCDLYEKLGEYGFQNAILVRYTQKAPQVSTPTLVEAARNLGRVGTKCCTLPEDQRLPCVEDYLSAILNRVCLLHEKTPVSEHVTKCCSGSLVERRPCFSALTVDETYVPKEFKAETFTFHSDICTLPEKEKQIKKQTALAELVKHKPKATAEQLKTVMDDFAQFLDTCCKAADKDTCFSTEGPNLVTRCKDALAGGGGSSGGPGPAGMKGLPGSHGTVIESLESLNNYFNSSGIDVEEKSLFLDIWRNWQKDGDMKILQSQIISFYLRLFEVLKDNQAISNNISVIESHLITTFFSNSKAKKDAFMSIAKFEVNNPQVQRQAFNELIRVVHQLLPESSLRKRKRSRCSGGPGPAGMKGLPGSEAHKSEIAHRYNDLGEQHFKGLVLIAFSQYLQKCSYDEHAKLVQEVTDFAKTCVADESAANCDKSLHTLFGDKLCAIPNLRENYGELADCCTKQEPERNECFLQHKDDNPSLPPFERPEAEAMCTSFKENPTTFMGHYLHEVARRHPYFYAPELLYYAEQYNEILTQCCAEADKESCLTPKLDGVKEKALVSSVRQRMKCSSMQKFGERAFKAWAVARLSQTFPNADFAEITKLATDLTKVNKECCHGDLLECADDRAELAKYMCENQATISSKLQTCCDKPLLKKAHCLSEVEHDTMPADLPAIAADFVEDQEVCKNYAEAKDVFLGTFLYEYSRRHPDYSVSLLLRLAKKYEATLEKCCAEANPPACYGTVLAEFQPLVEEPKNLVKTNCDLYEKLGEYGFQNAILVRYTQKAPQVSTPTLVEAARNLGRVGTKCCTLPEDQRLPCVEDYLSAILNRVCLLHEKTPVSEHVTKCCSGSLVERRPCFSALTVDETYVPKEFKAETFTFHSDICTLPEKEKQIKKQTALAELVKHKPKATAEQLKTVMDDFAQFLDTCCKAADKDTCFSTEGPNLVTRCKDALAHHHHHHEPEA

SEQ ID NO: 109 - protein, 2130 aa, Artificial Sequence
  source: /note="Description of Artificial Sequence: Synthetic polypeptide"
MDMRVPAQLLGLLLLWLRGARCEAHKSEIAHRYNDLGEQHFKGLVLIAFSQYLQKCSYDEHAKLVQEVTDFAKTCVADESAANCDKSLHTLFGDKLCAIPNLRENYGELADCCTKQEPERNECFLQHKDDNPSLPPFERPEAEAMCTSFKENPTTFMGHYLHEVARRHPYFYAPELLYYAEQYNEILTQCCAEADKESCLTPKLDGVKEKALVSSVRQRMKCSSMQKFGERAFKAWAVARLSQTFPNADFAEITKLATDLTKVNKECCHGDLLECADDRAELAKYMCENQATISSKLQTCCDKPLLKKAHCLSEVEHDTMPADLPAIAADFVEDQEVCKNYAEAKDVFLGTFLYEYSRRHPDYSVSLLLRLAKKYEATLEKCCAEANPPACYGTVLAEFQPLVEEPKNLVKTNCDLYEKLGEYGFQNAILVRYTQKAPQVSTPTLVEAARNLGRVGTKCCTLPEDQRLPCVEDYLSAILNRVCLLHEKTPVSEHVTKCCSGSLVERRPCFSALTVDETYVPKEFKAETFTFHSDICTLPEKEKQIKKQTALAELVKHKPKATAEQLKTVMDDFAQFLDTCCKAADKDTCFSTEGPNLVTRCKDALASGGPGPAGMKGLPGSHGTVIESLESLNNYFNSSGIDVEEKSLFLDIWRNWQKDGDMKILQSQIISFYLRLFEVLKDNQAISNNISVIESHLITTFFSNSKAKKDAFMSIAKFEVNNPQVQRQAFNELIRVVHQLLPESSLRKRKRSRCSGGPGPAGMKGLPGSGGGGSGGGGSEAHKSEIAHRYNDLGEQHFKGLVLIAFSQYLQKCSYDEHAKLVQEVTDFAKTCVADESAANCDKSLHTLFGDKLCAIPNLRENYGELADCCTKQEPERNECFLQHKDDNPSLPPFERPEAEAMCTSFKENPTTFMGHYLHEVARRHPYFYAPELLYYAEQYNEILTQCCAEADKESCLTPKLDGVKEKALVSSVRQRMKCSSMQKFGERAFKAWAVARLSQTFPNADFAEITKLATDLTKVNKECCHGDLLECADDRAELAKYMCENQATISSKLQTCCDKPLLKKAHCLSEVEHDTMPADLPAIAADFVEDQEVCKNYAEAKDVFLGTFLYEYSRRHPDYSVSLLLRLAKKYEATLEKCCAEANPPACYGTVLAEFQPLVEEPKNLVKTNCDLYEKLGEYGFQNAILVRYTQKAPQVSTPTLVEAARNLGRVGTKCCTLPEDQRLPCVEDYLSAILNRVCLLHEKTPVSEHVTKCCSGSLVERRPCFSALTVDETYVPKEFKAETFTFHSDICTLPEKEKQIKKQTALAELVKHKPKATAEQLKTVMDDFAQFLDTCCKAADKDTCFSTEGPNLVTRCKDALAGGGGSGGGGSSGGPGPAGMKGLPGSHGTVIESLESLNNYFNSSGIDVEEKSLFLDIWRNWQKDGDMKILQSQIISFYLRLFEVLKDNQAISNNISVIESHLITTFFSNSKAKKDAFMSIAKFEVNNPQVQRQAFNELIRVVHQLLPESSLRKRKRSRCSGGPGPAGMKGLPGSEAHKSEIAHRYNDLGEQHFKGLVLIAFSQYLQKCSYDEHAKLVQEVTDFAKTCVADESAANCDKSLHTLFGDKLCAIPNLRENYGELADCCTKQEPERNECFLQHKDDNPSLPPFERPEAEAMCTSFKENPTTFMGHYLHEVARRHPYFYAPELLYYAEQYNEILTQCCAEADKESCLTPKLDGVKEKALVSSVRQRMKCSSMQKFGERAFKAWAVARLSQTFPNADFAEITKLATDLTKVNKECCHGDLLECADDRAELAKYMCENQATISSKLQTCCDKPLLKKAHCLSEVEHDTMPADLPAIAADFVEDQEVCKNYAEAKDVFLGTFLYEYSRRHPDYSVSLLLRLAKKYEATLEKCCAEANPPACYGTVLAEFQPLVEEPKNLVKTNCDLYEKLGEYGFQNAILVRYTQKAPQVSTPTLVEAARNLGRVGTKCCTLPEDQRLPCVEDYLSAILNRVCLLHEKTPVSEHVTKCCSGSLVERRPCFSALTVDETYVPKEFKAETFTFHSDICTLPEKEKQIKKQTALAELVKHKPKATAEQLKTVMDDFAQFLDTCCKAADKDTCFSTEGPNLVTRCKDALAHHHHHHEPEA

SEQ ID NO: 110 - protein, 703 aa, Artificial Sequence
  source: /note="Description of Artificial Sequence: Synthetic polypeptide"
MDMRVPAQLLGLLLLWLRGARCEVQLVESGGGLVQPGNSLRLSCAASGFTFSKFGMSWVRQAPGKGLEWVSSISGSGRDTLYAESVKGRFTISRDNAKTTLYLQMNSLRPEDTAVYYCTIGGSLSVSSQGTLVTVSSGGGGSGGGGSGGGGSHGTVIESLESLNNYFNSSGIDVEEKSLFLDIWRNWQKDGDMKILQSQIISFYLRLFEVLKDNQAISNNISVIESHLITTFFSNSKAKKDAFMSIAKFEVNNPQVQRQAFNELIRVVHQLLPESSLRKRKRSRCGGGGSGGGGSGGGGSEVQLVESGGGLVQPGNSLRLSCAASGFTFSKFGMSWVRQAPGKGLEWVSSISGSGRDTLYAESVKGRFTISRDNAKTTLYLQMNSLRPEDTAVYYCTIGGSLSVSSQGTLVTVSSGGGGSGGGGSGGGGSHGTVIESLESLNNYFNSSGIDVEEKSLFLDIWRNWQKDGDMKILQSQIISFYLRLFEVLKDNQAISNNISVIESHLITTFFSNSKAKKDAFMSIAKFEVNNPQVQRQAFNELIRVVHQLLPESSLRKRKRSRCGGGGSGGGGSGGGGSEVQLVESGGGLVQPGNSLRLSCAASGFTFSKFGMSWVRQAPGKGLEWVSSISGSGRDTLYAESVKGRFTISRDNAKTTLYLQMNSLRPEDTAVYYCTIGGSLSVSSQGTLVTVSSHHHHHHEPEA

SEQ ID NO: 111 - protein, 832 aa, Artificial Sequence
  source: /note="Description of Artificial Sequence: Synthetic polypeptide"
MDMRVPAQLLGLLLLWLRGARCEVQLVESGGGLVQPGNSLRLSCAASGFTFSKFGMSWVRQAPGKGLEWVSSISGSGRDTLYAESVKGRFTISRDNAKTTLYLQMNSLRPEDTAVYYCTIGGSLSVSSQGTLVTVSSSGGPGPAGMKGLPGSHGTVIESLESLNNYFNSSGIDVEEKSLFLDIWRNWQKDGDMKILQSQIISFYLRLFEVLKDNQAISNNISVIESHLITTFFSNSKAKKDAFMSIAKFEVNNPQVQRQAFNELIRVVHQLLPESSLRKRKRSRCSGGPGPAGMKGLPGSEVQLVESGGGLVQPGNSLRLSCAASGFTFSKFGMSWVRQAPGKGLEWVSSISGSGRDTLYAESVKGRFTISRDNAKTTLYLQMNSLRPEDTAVYYCTIGGSLSVSSQGTLVTVSSSGGPGPAGMKGLPGSHGTVIESLESLNNYFNSSGIDVEEKSLFLDIWRNWQKDGDMKILQSQIISFYLRLFEVLKDNQAISNNISVIESHLITTFFSNSKAKKDAFMSIAKFEVNNPQVQRQAFNELIRVVHQLLPESSLRKRKRSRCSGGPGPAGMKGLPGSEVQLVESGGGLVQPGNSLRLSCAASGFTFSKFGMSWVRQAPGKGLEWVSSISGSGRDTLYAESVKGRFTISRDNAKTTLYLQMNSLRPEDTAVYYCTIGGSLSVSSQGTLVTVSSGGGGSGGGGSGGGGSQVQLQESGGGLAQAGGSLSLSCAASGFTVSNSVMAWYRQTPGKQREFVAIINSVGSTNYADSVKGRFTISRDNAKNTVYLQMNNLKPEDTAVYVCNRNFDRIYWGQGTQVTVSSHHHHHHEPEA

SEQ ID NO: 112 - protein, 832 aa, Artificial Sequence
  source: /note="Description of Artificial Sequence: Synthetic polypeptide"
MDMRVPAQLLGLLLLWLRGARCQVQLQESGGGLAQAGGSLSLSCAASGFTVSNSVMAWYRQTPGKQREFVAIINSVGSTNYADSVKGRFTISRDNAKNTVYLQMNNLKPEDTAVYVCNRNFDRIYWGQGTQVTVSSGGGGSGGGGSGGGGSEVQLVESGGGLVQPGNSLRLSCAASGFTFSKFGMSWVRQAPGKGLEWVSSISGSGRDTLYAESVKGRFTISRDNAKTTLYLQMNSLRPEDTAVYYCTIGGSLSVSSQGTLVTVSSSGGPGPAGMKGLPGSHGTVIESLESLNNYFNSSGIDVEEKSLFLDIWRNWQKDGDMKILQSQIISFYLRLFEVLKDNQAISNNISVIESHLITTFFSNSKAKKDAFMSIAKFEVNNPQVQRQAFNELIRVVHQLLPESSLRKRKRSRCSGGPGPAGMKGLPGSEVQLVESGGGLVQPGNSLRLSCAASGFTFSKFGMSWVRQAPGKGLEWVSSISGSGRDTLYAESVKGRFTISRDNAKTTLYLQMNSLRPEDTAVYYCTIGGSLSVSSQGTLVTVSSSGGPGPAGMKGLPGSHGTVIESLESLNNYFNSSGIDVEEKSLFLDIWRNWQKDGDMKILQSQIISFYLRLFEVLKDNQAISNNISVIESHLITTFFSNSKAKKDAFMSIAKFEVNNPQVQRQAFNELIRVVHQLLPESSLRKRKRSRCSGGPGPAGMKGLPGSEVQLVESGGGLVQPGNSLRLSCAASGFTFSKFGMSWVRQAPGKGLEWVSSISGSGRDTLYAESVKGRFTISRDNAKTTLYLQMNSLRPEDTAVYYCTIGGSLSVSSQGTLVTVSSHHHHHHEPEA

SEQ ID NO: 113 - protein, 549 aa, Artificial Sequence
  source: /note="Description of Artificial Sequence: Synthetic polypeptide"
MDMRVPAQLLGLLLLWLRGARCRVIPVSGPARCLSQSRNLLKTTDDMVKTAREKLKHYSCTAEDIDHEDITRDQTSTLKTCLPLELHKNESCLATRETSSTTRGSCLPPQKTSLMMTLCLGSIYEDLKMYQTEFQAINAALQNHNHQQIILDKGMLVAIDELMQSLNHNGETLRQKPPVGEADPYRVKMKLCILLHAFSTRVVTINRVMGYLSSASGGPGPAGMKGLPGSMWELEKDVYVVEVDWTPDAPGETVNLTCDTPEEDDITWTSDQRHGVIGSGKTLTITVKEFLDAGQYTCHKGGETLSHSHLLLHKKENGIWSTEILKNFKNKTFLKCEAPNYSGRFTCSWLVQRNMDLKFNIKSSSSSPDSRAVTCGMASLSAEKVTLDQRDYEKYSVSCQEDVTCPTAEETLPIELALEARQQNKYENYSTSFFIRDIIKPDPPKNLQMKPLKNSQVEVSWEYPDSWSTPHSYFSLKFFVRIQRKKEKMKETEEGCNQKGAFLVEKTSTEVQCKGGNVCVQAQDRYYNSSCSKWACVPCRVRSHHHHHH

SEQ ID NO: 114 - protein, 579 aa, Artificial Sequence
  source: /note="Description of Artificial Sequence: Synthetic polypeptide"
MDMRVPAQLLGLLLLWLRGARCRVIPVSGPARCLSQSRNLLKTTDDMVKTAREKLKHYSCTAEDIDHEDITRDQTSTLKTCLPLELHKNESCLATRETSSTTRGSCLPPQKTSLMMTLCLGSIYEDLKMYQTEFQAINAALQNHNHQQIILDKGMLVAIDELMQSLNHNGETLRQKPPVGEADPYRVKMKLCILLHAFSTRVVTINRVMGYLSSAGGGGSGGGGSGGGGSSGGPGPAGMKGLPGSGGGGSGGGGSGGGGSMWELEKDVYVVEVDWTPDAPGETVNLTCDTPEEDDITWTSDQRHGVIGSGKTLTITVKEFLDAGQYTCHKGGETLSHSHLLLHKKENGIWSTEILKNFKNKTFLKCEAPNYSGRFTCSWLVQRNMDLKFNIKSSSSSPDSRAVTCGMASLSAEKVTLDQRDYEKYSVSCQEDVTCPTAEETLPIELALEARQQNKYENYSTSFFIRDIIKPDPPKNLQMKPLKNSQVEVSWEYPDSWSTPHSYFSLKFFVRIQRKKEKMKETEEGCNQKGAFLVEKTSTEVQCKGGNVCVQAQDRYYNSSCSKWACVPCRVRSHHHHHH

SEQ ID NO: 115 - protein, 809 aa, Artificial Sequence
  source: /note="Description of Artificial Sequence: Synthetic polypeptide"
MDMRVPAQLLGLLLLWLRGARCEVQLVESGGGLVQPGNSLRLSCAASGFTFSKFGMSWVRQAPGKGLEWVSSISGSGRDTLYAESVKGRFTISRDNAKTTLYLQMNSLRPEDTAVYYCTIGGSLSVSSQGTLVTVSSSGGPGPAGMKGLPGSMWELEKDVYVVEVDWTPDAPGETVNLTCDTPEEDDITWTSDQRHGVIGSGKTLTITVKEFLDAGQYTCHKGGETLSHSHLLLHKKENGIWSTEILKNFKNKTFLKCEAPNYSGRFTCSWLVQRNMDLKFNIKSSSSSPDSRAVTCGMASLSAEKVTLDQRDYEKYSVSCQEDVTCPTAEETLPIELALEARQQNKYENYSTSFFIRDIIKPDPPKNLQMKPLKNSQVEVSWEYPDSWSTPHSYFSLKFFVRIQRKKEKMKETEEGCNQKGAFLVEKTSTEVQCKGGNVCVQAQDRYYNSSCSKWACVPCRVRSGGGGSGGGGSGGGGSRVIPVSGPARCLSQSRNLLKTTDDMVKTAREKLKHYSCTAEDIDHEDITRDQTSTLKTCLPLELHKNESCLATRETSSTTRGSCLPPQKTSLMMTLCLGSIYEDLKMYQTEFQAINAALQNHNHQQIILDKGMLVAIDELMQSLNHNGETLRQKPPVGEADPYRVKMKLCILLHAFSTRVVTINRVMGYLSSASGGPGPAGMKGLPGSEVQLVESGGGLVQPGNSLRLSCAASGFTFSKFGMSWVRQAPGKGLEWVSSISGSGRDTLYAESVKGRFTISRDNAKTTLYLQMNSLRPEDTAVYYCTIGGSLSVSSQGTLVTVSSHHHHHH

SEQ ID NO: 116 - protein, 938 aa, Artificial Sequence
  source: /note="Description of Artificial Sequence: Synthetic polypeptide"
MDMRVPAQLLGLLLLWLRGARCQVQLQESGGGLVQAGGSLRLSCAASGRIFSIDIMSWYRQAPGKQRELVARITRGGTISYDDSVKGRFTISRDNAKNTVYLQMNSLKPEDTGVYYCNALYGTDYWGKGTQVTVSSGGGGSGGGGSGGGGSEVQLVESGGGLVQPGNSLRLSCAASGFTFSKFGMSWVRQAPGKGLEWVSSISGSGRDTLYAESVKGRFTISRDNAKTTLYLQMNSLRPEDTAVYYCTIGGSLSVSSQGTLVTVSSSGGPGPAGMKGLPGSMWELEKDVYVVEVDWTPDAPGETVNLTCDTPEEDDITWTSDQRHGVIGSGKTLTITVKEFLDAGQYTCHKGGETLSHSHLLLHKKENGIWSTEILKNFKNKTFLKCEAPNYSGRFTCSWLVQRNMDLKFNIKSSSSSPDSRAVTCGMASLSAEKVTLDQRDYEKYSVSCQEDVTCPTAEETLPIELALEARQQNKYENYSTSFFIRDIIKPDPPKNLQMKPLKNSQVEVSWEYPDSWSTPHSYFSLKFFVRIQRKKEKMKETEEGCNQKGAFLVEKTSTEVQCKGGNVCVQAQDRYYNSSCSKWACVPCRVRSGGGGSGGGGSGGGGSRVIPVSGPARCLSQSRNLLKTTDDMVKTAREKLKHYSCTAEDIDHEDITRDQTSTLKTCLPLELHKNESCLATRETSSTTRGSCLPPQKTSLMMTLCLGSIYEDLKMYQTEFQAINAALQNHNHQQIILDKGMLVAIDELMQSLNHNGETLRQKPPVGEADPYRVKMKLCILLHAFSTRVVTINRVMGYLSSASGGPGPAGMKGLPGSEVQLVESGGGLVQPGNSLRLSCAASGFTFSKFGMSWVRQAPGKGLEWVSSISGSGRDTLYAESVKGRFTISRDNAKTTLYLQMNSLRPEDTAVYYCTIGGSLSVSSQGTLVTVSSHHHHHH

SEQ ID NO: 117 - protein, 938 aa, Artificial Sequence; identical to SEQ ID NO: 116
  source: /note="Description of Artificial Sequence: Synthetic polypeptide"

SEQ ID NO: 118 - protein, 938 aa, Artificial Sequence
  source: /note="Description of Artificial Sequence: Synthetic polypeptide"
MDMRVPAQLLGLLLLWLRGARCEVQLVESGGGLVQPGNSLRLSCAASGFTFSKFGMSWVRQAPGKGLEWVSSISGSGRDTLYAESVKGRFTISRDNAKTTLYLQMNSLRPEDTAVYYCTIGGSLSVSSQGTLVTVSSSGGPGPAGMKGLPGSMWELEKDVYVVEVDWTPDAPGETVNLTCDTPEEDDITWTSDQRHGVIGSGKTLTITVKEFLDAGQYTCHKGGETLSHSHLLLHKKENGIWSTEILKNFKNKTFLKCEAPNYSGRFTCSWLVQRNMDLKFNIKSSSSSPDSRAVTCGMASLSAEKVTLDQRDYEKYSVSCQEDVTCPTAEETLPIELALEARQQNKYENYSTSFFIRDIIKPDPPKNLQMKPLKNSQVEVSWEYPDSWSTPHSYFSLKFFVRIQRKKEKMKETEEGCNQKGAFLVEKTSTEVQCKGGNVCVQAQDRYYNSSCSKWACVPCRVRSGGGGSGGGGSGGGGSRVIPVSGPARCLSQSRNLLKTTDDMVKTAREKLKHYSCTAEDIDHEDITRDQTSTLKTCLPLELHKNESCLATRETSSTTRGSCLPPQKTSLMMTLCLGSIYEDLKMYQTEFQAINAALQNHNHQQIILDKGMLVAIDELMQSLNHNGETLRQKPPVGEADPYRVKMKLCILLHAFSTRVVTINRVMGYLSSASGGPGPAGMKGLPGSEVQLVESGGGLVQPGNSLRLSCAASGFTFSKFGMSWVRQAPGKGLEWVSSISGSGRDTLYAESVKGRFTISRDNAKTTLYLQMNSLRPEDTAVYYCTIGGSLSVSSQGTLVTVSSGGGGSGGGGSGGGGSQVQLQESGGGLVQAGGSLRLSCAASGRIFSIDIMSWYRQAPGKQRELVARITRGGTISYDDSVKGRFTISRDNAKNTVYLQMNSLKPEDTGVYYCNALYGTDYWGKGTQVTVSSHHHHHH

SEQ ID NO: 119 - protein, 962 aa, Artificial Sequence
  source: /note="Description of Artificial Sequence: Synthetic polypeptide"
MDMRVPAQLLGLLLLWLRGARCIWELKKDVYVVELDWYPDAPGEMVVLTCDTPEEDGITWTLDQSSEVLGSGKTLTIQVKEFGDAGQYTCHKGGEVLSHSLLLLHKKEDGIWSTDILKDQKEPKNKTFLRCEAKNYSGRFTCWWLTTISTDLTFSVKSSRGSSDPQGVTCGAATLSAERVRGDNKEYEYSVECQEDSACPAAEESLPIEVMVDAVHKLKYENYTSSFFIRDIIKPDPPKNLQLKPLKNSRQVEVSWEYPDTWSTPHSYFSLTFCVQVQGKSKREKKDRVFTDKTSATVICRKNASISVRAQDRYYSSSWSEWASVPCSGGGGSGGGGSGGGGSRVIPVSGPARCLSQSRNLLKTTDDMVKTAREKLKHYSCTAEDIDHEDITRDQTSTLKTCLPLELHKNESCLATRETSSTTRGSCLPPQKTSLMMTLCLGSIYEDLKMYQTEFQAINAALQNHNHQQIILDKGMLVAIDELMQSLNHNGETLRQKPPVGEADPYRVKMKLCILLHAFSTRVVTINRVMGYLSSAGGGGSGGGGSGGGGSGGGGSGGGGSGGGGSGGGGSGGGGSGGGGSQSVLTQPPSVSGAPGQRVTISCSGSRSNIGSNTVKWYQQLPGTAPKLLIYYNDQRPSGVPDRFSGSKSGTSASLAITGLQAEDEADYYCQSYDRYTHPALLFGTGTKVTVLGGGGSGGGGSGGGGSQVQLVESGGGVVQPGRSLRLSCAASGFTFSSYGMHWVRQAPGKGLEWVAFIRYDGSNKYYADSVKGRFTISRDNSKNTLYLQMNSLRAEDTAVYYCKTHGSHDNWGQGTMVTVSSGGGGSGGGGSGGGGSEVQLVESGGGLVQPGNSLRLSCAASGFTFSKFGMSWVRQAPGKGLEWVSSISGSGRDTLYAESVKGRFTISRDNAKTTLYLQMNSLRPEDTAVYYCTIGGSLSVSSQGTLVTVSSHHHHHHEPEA

SEQ ID NO: 120 - protein, 832 aa, Artificial Sequence
  source: /note="Description of Artificial Sequence: Synthetic polypeptide"
MDMRVPAQLLGLLLLWLRGARCIWELKKDVYVVELDWYPDAPGEMVVLTCDTPEEDGITWTLDQSSEVLGSGKTLTIQVKEFGDAGQYTCHKGGEVLSHSLLLLHKKEDGIWSTDILKDQKEPKNKTFLRCEAKNYSGRFTCWWLTTISTDLTFSVKSSRGSSDPQGVTCGAATLSAERVRGDNKEYEYSVECQEDSACPAAEESLPIEVMVDAVHKLKYENYTSSFFIRDIIKPDPPKNLQLKPLKNSRQVEVSWEYPDTWSTPHSYFSLTFCVQVQGKSKREKKDRVFTDKTSATVICRKNASISVRAQDRYYSSSWSEWASVPCSGGGGSGGGGSGGGGSRVIPVSGPARCLSQSRNLLKTTDDMVKTAREKLKHYSCTAEDIDHEDITRDQTSTLKTCLPLELHKNESCLATRETSSTTRGSCLPPQKTSLMMTLCLGSIYEDLKMYQTEFQAINAALQNHNHQQIILDKGMLVAIDELMQSLNHNGETLRQKPPVGEADPYRVKMKLCILLHAFSTRVVTINRVMGYLSSASGGPGPAGMKGLPGSGGGGSGGGGSGGGGSGGGGSGGGGSGGGGSQSVLTQPPSVSGAPGQRVTISCSGSRSNIGSNTVKWYQQLPGTAPKLLIYYNDQRPSGVPDRFSGSKSGTSASLAITGLQAEDEADYYCQSYDRYTHPALLFGTGTKVTVLGGGGSGGGGSGGGGSQVQLVESGGGVVQPGRSLRLSCAASGFTFSSYGMHWVRQAPGKGLEWVAFIRYDGSNKYYADSVKGRFTISRDNSKNTLYLQMNSLRAEDTAVYYCKTHGSHDNWGQGTMVTVSSHHHHHHEPEA

SEQ ID NO: 121 - protein, 1091 aa, Artificial Sequence
  source: /note="Description of Artificial Sequence: Synthetic polypeptide"
MDMRVPAQLLGLLLLWLRGARCIWELKKDVYVVELDWYPDAPGEMVVLTCDTPEEDGITWTLDQSSEVLGSGKTLTIQVKEFGDAGQYTCHKGGEVLSHSLLLLHKKEDGIWSTDILKDQKEPKNKTFLRCEAKNYSGRFTCWWLTTISTDLTFSVKSSRGSSDPQGVTCGAATLSAERVRGDNKEYEYSVECQEDSACPAAEESLPIEVMVDAVHKLKYENYTSSFFIRDIIKPDPPKNLQLKPLKNSRQVEVSWEYPDTWSTPHSYFSLTFCVQVQGKSKREKKDRVFTDKTSATVICRKNASISVRAQDRYYSSSWSEWASVPCSGGGGSGGGGSGGGGSRVIPVSGPARCLSQSRNLLKTTDDMVKTAREKLKHYSCTAEDIDHEDITRDQTSTLKTCLPLELHKNESCLATRETSSTTRGSCLPPQKTSLMMTLCLGSIYEDLKMYQTEFQAINAALQNHNHQQIILDKGMLVAIDELMQSLNHNGETLRQKPPVGEADPYRVKMKLCILLHAFSTRVVTINRVMGYLSSASGGPGPAGMKGLPGSGGGGSGGGGSGGGGSGGGGSGGGGSGGGGSQSVLTQPPSVSGAPGQRVTISCSGSRSNIGSNTVKWYQQLPGTAPKLLIYYNDQRPSGVPDRFSGSKSGTSASLAITGLQAEDEADYYCQSYDRYTHPALLFGTGTKVTVLGGGGSGGGGSGGGGSQVQLVESGGGVVQPGRSLRLSCAASGFTFSSYGMHWVRQAPGKGLEWVAFIRYDGSNKYYADSVKGRFTISRDNSKNTLYLQMNSLRAEDTAVYYCKTHGSHDNWGQGTMVTVSSGGGGSGGGGSGGGGSEVQLVESGGGLVQPGNSLRLSCAASGFTFSKFGMSWVRQAPGKGLEWVSSISGSGRDTLYAESVKGRFTISRDNAKTTLYLQMNSLRPEDTAVYYCTIGGSLSVSSQGTLVTVSSGGGGSGGGGSGGGGSQVQLQESGGGLAQAGGSLSLSCAASGFTVSNSVMAWYRQTPGKQREFVAIINSVGSTNYADSVKGRFTISRDNAKNTVYLQMNNLKPEDTAVYVCNRNFDRIYWGQGTQVTVSSHHHHHHEPEA

SEQ ID NO: 122 - protein, 1091 aa, Artificial Sequence
  source: /note="Description of Artificial Sequence: Synthetic polypeptide"
MDMRVPAQLLGLLLLWLRGARCQVQLQESGGGLAQAGGSLSLSCAASGFTVSNSVMAWYRQTPGKQREFVAIINSVGSTNYADSVKGRFTISRDNAKNTVYLQMNNLKPEDTAVYVCNRNFDRIYWGQGTQVTVSSGGGGSGGGGSGGGGSIWELKKDVYVVELDWYPDAPGEMVVLTCDTPEEDGITWTLDQSSEVLGSGKTLTIQVKEFGDAGQYTCHKGGEVLSHSLLLLHKKEDGIWSTDILKDQKEPKNKTFLRCEAKNYSGRFTCWWLTTISTDLTFSVKSSRGSSDPQGVTCGAATLSAERVRGDNKEYEYSVECQEDSACPAAEESLPIEVMVDAVHKLKYENYTSSFFIRDIIKPDPPKNLQLKPLKNSRQVEVSWEYPDTWSTPHSYFSLTFCVQVQGKSKREKKDRVFTDKTSATVICRKNASISVRAQDRYYSSSWSEWASVPCSGGGGSGGGGSGGGGSRVIPVSGPARCLSQSRNLLKTTDDMVKTAREKLKHYSCTAEDIDHEDITRDQTSTLKTCLPLELHKNESCLATRETSSTTRGSCLPPQKTSLMMTLCLGSIYEDLKMYQTEFQAINAALQNHNHQQIILDKGMLVAIDELMQSLNHNGETLRQKPPVGEADPYRVKMKLCILLHAFSTRVVTINRVMGYLSSASGGPGPAGMKGLPGSGGGGSGGGGSGGGGSGGGGSGGGGSGGGGSQSVLTQPPSVSGAPGQRVTISCSGSRSNIGSNTVKWYQQLPGTAPKLLIYYNDQRPSGVPDRFSGSKSGTSASLAITGLQAEDEADYYCQSYDRYTHPALLFGTGTKVTVLGGGGSGGGGSGGGGSQVQLVESGGGVVQPGRSLRLSCAASGFTFSSYGMHWVRQAPGKGLEWVAFIRYDGSNKYYADSVKGRFTISRDNSKNTLYLQMNSLRAEDTAVYYCKTHGSHDNWGQGTMVTVSSGGGGSGGGGSGGGGSEVQLVESGGGLVQPGNSLRLSCAASGFTFSKFGMSWVRQAPGKGLEWVSSISGSGRDTLYAESVKGRFTISRDNAKTTLYLQMNSLRPEDTAVYYCTIGGSLSVSSQGTLVTVSSHHHHHHEPEA

SEQ ID NO: 123 - protein, 1091 aa, Artificial Sequence
  source: /note="Description of Artificial Sequence: Synthetic polypeptide"
MDMRVPAQLLGLLLLWLRGARCQVQLQESGGGLAQAGGSLSLSCAASGFTVSNSVMAWYRQTPGKQREFVAIINSVGSTNYADSVKGRFTISRDNAKNTVYLQMNNLKPEDTAVYVCNRNFDRIYWGQGTQVTVSSSGGPGPAGMKGLPGSIWELKKDVYVVELDWYPDAPGEMVVLTCDTPEEDGITWTLDQSSEVLGSGKTLTIQVKEFGDAGQYTCHKGGEVLSHSLLLLHKKEDGIWSTDILKDQKEPKNKTFLRCEAKNYSGRFTCWWLTTISTDLTFSVKSSRGSSDPQGVTCGAATLSAERVRGDNKEYEYSVECQEDSACPAAEESLPIEVMVDAVHKLKYENYTSSFFIRDIIKPDPPKNLQLKPLKNSRQVEVSWEYPDTWSTPHSYFSLTFCVQVQGKSKREKKDRVFTDKTSATVICRKNASISVRAQDRYYSSSWSEWASVPCSGGGGSGGGGSGGGGSRVIPVSGPARCLSQSRNLLKTTDDMVKTAREKLKHYSCTAEDIDHEDITRDQTSTLKTCLPLELHKNESCLATRETSSTTRGSCLPPQKTSLMMTLCLGSIYEDLKMYQTEFQAINAALQNHNHQQIILDKGMLVAIDELMQSLNHNGETLRQKPPVGEADPYRVKMKLCILLHAFSTRVVTINRVMGYLSSASGGPGPAGMKGLPGSGGGGSGGGGSGGGGSGGGGSGGGGSGGGGSQSVLTQPPSVSGAPGQRVTISCSGSRSNIGSNTVKWYQQLPGTAPKLLIYYNDQRPSGVPDRFSGSKSGTSASLAITGLQAEDEADYYCQSYDRYTHPALLFGTGTKVTVLGGGGSGGGGSGGGGSQVQLVESGGGVVQPGRSLRLSCAASGFTFSSYGMHWVRQAPGKGLEWVAFIRYDGSNKYYADSVKGRFTISRDNSKNTLYLQMNSLRAEDTAVYYCKTHGSHDNWGQGTMVTVSSGGGGSGGGGSGGGGSEVQLVESGGGLVQPGNSLRLSCAASGFTFSKFGMSWVRQAPGKGLEWVSSISGSGRDTLYAESVKGRFTISRDNAKTTLYLQMNSLRPEDTAVYYCTIGGSLSVSSQGTLVTVSSHHHHHHEPEA

SEQ ID NO: 124 - protein, 674 aa, Artificial Sequence
  source: /note="Description of Artificial Sequence: Synthetic polypeptide"
MDMRVPAQLLGLLLLWLRGARCAPTSSSTKKTQLQLEHLLLDLQMILNGINNYKNPKLTRMLTFKFYMPKKATELKHLQCLEEELKPLEEVLNLAQSKNFHLRPRDLISNINVIVLELKGSETTFMCEYADETATIVEFLNRWITFCQSIISTLTSGGPGPAGMKGLPGSEVQLVESGGGLVQPGGSLRLSCAASGFTFSSYTLAWVRQAPGKGLEWVAAIDSSSYTYSPDTVRGRFTISRDNAKNSLYLQMNSLRAEDTAVYYCARDSNWDALDYWGQGTTVTVSSGGGGSGGGGSGGGGSDIQMTQSPSSLSASVGDRVTITCKASQNVGTNVGWYQQKPGKAPKALIYSASFRYSGVPSRFSGSGSGTDFTLTISSLQPEDFATYYCQQYYTYPYTFGGGTKVEIKGGGGSGGGGSGGGGSEVQLVESGGGLVQPGNSLRLSCAASGFTFSKFGMSWVRQAPGKGLEWVSSISGSGRDTLYAESVKGRFTISRDNAKTTLYLQMNSLRPEDTAVYYCTIGGSLSVSSQGTLVTVSSGGGGSGGGGSGGGGSQVQLQESGGGLVQAGGSLRLSCAASGRIFSIDIMSWYRQAPGKQRELVARITRGGTISYDDSVKGRFTISRDNAKNTVYLQMNSLKPEDTGVYYCNALYGTDYWGKGTQVTVSSHHHHHH

SEQ ID NO: 125 - protein, 674 aa, Artificial Sequence
  source: /note="Description of Artificial Sequence: Synthetic polypeptide"
MDMRVPAQLLGLLLLWLRGARCQVQLQESGGGLVQAGGSLRLSCAASGRIFSIDIMSWYRQAPGKQRELVARITRGGTISYDDSVKGRFTISRDNAKNTVYLQMNSLKPEDTGVYYCNALYGTDYWGKGTQVTVSSSGGPGPAGMKGLPGSEVQLVESGGGLVQPGNSLRLSCAASGFTFSKFGMSWVRQAPGKGLEWVSSISGSGRDTLYAESVKGRFTISRDNAKTTLYLQMNSLRPEDTAVYYCTIGGSLSVSSQGTLVTVSSSGGPGPAGMKGLPGSEVQLVESGGGLVQPGGSLRLSCAASGFTFSSYTLAWVRQAPGKGLEWVAAIDSSSYTYSPDTVRGRFTISRDNAKNSLYLQMNSLRAEDTAVYYCARDSNWDALDYWGQGTTVTVSSGGGGSGGGGSGGGGSDIQMTQSPSSLSASVGDRVTITCKASQNVGTNVGWYQQKPGKAPKALIYSASFRYSGVPSRFSGSGSGTDFTLTISSLQPEDFATYYCQQYYTYPYTFGGGTKVEIKSGGPGPAGMKGLPGSAPTSSSTKKTQLQLEHLLLDLQMILNGINNYKNPKLTRMLTFKFYMPKKATELKHLQCLEEELKPLEEVLNLAQSKNFHLRPRDLISNINVIVLELKGSETTFMCEYADETATIVEFLNRWITFCQSIISTLTHHHHHH

SEQ ID NO: 126 - protein, 425 aa, Artificial Sequence
  source: /note="Description of Artificial Sequence: Synthetic polypeptide"
MDMRVPAQLLGLLLLWLRGARCELCDDDPPEIPHATFKAMAYKEGTMLNCECKRGFRRIKSGSLYMLCTGNSSHSSWDNQCQCTSSATRNTTKQVTPQPEEQKERKTTEMQSPMQPVDQASLPGHCREPPPWENEATERIYHFVVGQMVYYQCVQGYRALHRGPAESVCKMTHGKTRWTQPQLICTGEMETSQFPGEEKPQASPEGRPESETSCLVTTTDFQIQTEMAATMETSIFTTEYQGGGGSGGGGSGGGGSGGGGSGGGGSGGGGSSGGPGPAGMKGLPGSAPTSSSTKKTQLQLEHLLLDLQMILNGINNYKNPKLTRMLTFKFYMPKKATELKHLQCLEEELKPLEEVLNLAQSKNFHLRPRDLISNINVIVLELKGSETTFMCEYADETATIVEFLNRWITFCQSIISTLTHHHHHH

SEQ ID NO: 127 - protein, 425 aa, Artificial Sequence
  source: /note="Description of Artificial Sequence: Synthetic polypeptide"
MDMRVPAQLLGLLLLWLRGARCAPTSSSTKKTQLQLEHLLLDLQMILNGINNYKNPKLTRMLTFKFYMPKKATELKHLQCLEEELKPLEEVLNLAQSKNFHLRPRDLISNINVIVLELKGSETTFMCEYADETATIVEFLNRWITFCQSIISTLTSGGPGPAGMKGLPGSGGGGSGGGGSGGGGSGGGGSGGGGSGGGGSELCDDDPPEIPHATFKAMAYKEGTMLNCECKRGFRRIKSGSLYMLCTGNSSHSSWDNQCQCTSSATRNTTKQVTPQPEEQKERKTTEMQSPMQPVDQASLPGHCREPPPWENEATERIYHFVVGQMVYYQCVQGYRALHRGPAESVCKMTHGKTRWTQPQLICTGEMETSQFPGEEKPQASPEGRPESETSCLVTTTDFQIQTEMAATMETSIFTTEYQHHHHHH

SEQ ID NO: 128 - protein, 555 aa, Artificial Sequence
  source: /note="Description of Artificial Sequence: Synthetic polypeptide"
MDMRVPAQLLGLLLLWLRGARCEVQLVESGGGLVQPGNSLRLSCAASGFTFSKFGMSWVRQAPGKGLEWVSSISGSGRDTLYAESVKGRFTISRDNAKTTLYLQMNSLRPEDTAVYYCTIGGSLSVSSQGTLVTVSSGGGGSGGGGSGGGGSELCDDDPPEIPHATFKAMAYKEGTMLNCECKRGFRRIKSGSLYMLCTGNSSHSSWDNQCQCTSSATRNTTKQVTPQPEEQKERKTTEMQSPMQPVDQASLPGHCREPPPWENEATERIYHFVVGQMVYYQCVQGYRALHRGPAESVCKMTHGKTRWTQPQLICTGEMETSQFPGEEKPQASPEGRPESETSCLVTTTDFQIQTEMAATMETSIFTTEYQGGGGSGGGGSGGGGSGGGGSGGGGSGGGGSSGGPGPAGMKGLPGSAPTSSSTKKTQLQLEHLLLDLQMILNGINNYKNPKLTRMLTFKFYMPKKATELKHLQCLEEELKPLEEVLNLAQSKNFHLRPRDLISNINVIVLELKGSETTFMCEYADETATIVEFLNRWITFCQSIISTLTHHHHHH

SEQ ID NO: 129 - protein, 555 aa, Artificial Sequence
  source: /note="Description of Artificial Sequence: Synthetic polypeptide"
MDMRVPAQLLGLLLLWLRGARCAPTSSSTKKTQLQLEHLLLDLQMILNGINNYKNPKLTRMLTFKFYMPKKATELKHLQCLEEELKPLEEVLNLAQSKNFHLRPRDLISNINVIVLELKGSETTFMCEYADETATIVEFLNRWITFCQSIISTLTSGGPGPAGMKGLPGSGGGGSGGGGSGGGGSGGGGSGGGGSGGGGSELCDDDPPEIPHATFKAMAYKEGTMLNCECKRGFRRIKSGSLYMLCTGNSSHSSWDNQCQCTSSATRNTTKQVTPQPEEQKERKTTEMQSPMQPVDQASLPGHCREPPPWENEATERIYHFVVGQMVYYQCVQGYRALHRGPAESVCKMTHGKTRWTQPQLICTGEMETSQFPGEEKPQASPEGRPESETSCLVTTTDFQIQTEMAATMETSIFTTEYQGGGGSGGGGSGGGGSEVQLVESGGGLVQPGNSLRLSCAASGFTFSKFGMSWVRQAPGKGLEWVSSISGSGRDTLYAESVKGRFTISRDNAKTTLYLQMNSLRPEDTAVYYCTIGGSLSVSSQGTLVTVSSHHHHHH

SEQ ID NO: 130 - protein, 555 aa, Artificial Sequence
  source: /note="Description of Artificial Sequence: Synthetic polypeptide"
MDMRVPAQLLGLLLLWLRGARCAPTSSSTKKTQLQLEHLLLDLQMILNGINNYKNPKLTRMLTFKFYMPKKATELKHLQCLEEELKPLEEVLNLAQSKNFHLRPRDLISNINVIVLELKGSETTFMCEYADETATIVEFLNRWITFCQSIISTLTSGGPGPAGMKGLPGSGGGGSGGGGSGGGGSGGGGSGGGGSGGGGSELCDDDPPEIPHATFKAMAYKEGTMLNCECKRGFRRIKSGSLYMLCTGNSSHSSWDNQCQCTSSATRNTTKQVTPQPEEQKERKTTEMQSPMQPVDQASLPGHCREPPPWENEATERIYHFVVGQMVYYQCVQGYRALHRGPAESVCKMTHGKTRWTQPQLICTGEMETSQFPGEEKPQASPEGRPESETSCLVTTTDFQIQTEMAATMETSIFTTEYQSGGPGPAGMKGLPGSEVQLVESGGGLVQPGNSLRLSCAASGFTFSKFGMSWVRQAPGKGLEWVSSISGSGRDTLYAESVKGRFTISRDNAKTTLYLQMNSLRPEDTAVYYCTIGGSLSVSSQGTLVTVSSHHHHHH

SEQ ID NO: 131 - protein, 575 aa, Artificial Sequence
  source: /note="Description of Artificial Sequence: Synthetic polypeptide"
MDMRVPAQLLGLLLLWLRGARCEVQLVESGGGLVQPGNSLRLSCAASGFTFSKFGMSWVRQAPGKGLEWVSSISGSGRDTLYAESVKGRFTISRDNAKTTLYLQMNSLRPEDTAVYYCTIGGSLSVSSQGTLVTVSSSGGPGPAGMKGLPGSEVQLVESGGGLVQPGGSLRLSCAASGFTFSSYTLAWVRQAPGKGLEWVAAIDSSSYTYSPDTVRGRFTISRDNAKNSLYLQMNSLRAEDTAVYYCARDSNWDALDYWGQGTTVTVSSGGGGSGGGGSGGGGSDIQMTQSPSSLSASVGDRVTITCKASQNVGTNVGWYQQKPGKAPKALIYSASFRYSGVPSRFSGSGSGTDFTLTISSLQPEDFATYYCQQYYTYPYTFGGGTKVEIKGGGGSGGGGSGGGGSGGGGSGGGGSGGGGSSGGPGPAGMKGLPGSAPTSSSTKKTQLQLEHLLLDLQMILNGINNYKNPKLTRMLTFKFYMPKKATELKHLQCLEEELKPLEEVLNLAQSKNFHLRPRDLISNINVIVLELKGSETTFMCEYADETATIVEFLNRWITFCQSIISTLTHHHHHH

SEQ ID NO: 132 - protein, 704 aa, Artificial Sequence
  source: /note="Description of Artificial Sequence: Synthetic polypeptide"
MDMRVPAQLLGLLLLWLRGARCAPTSSSTKKTQLQLEHLLLDLQMILNGINNYKNPKLTRMLTFKFYMPKKATELKHLQCLEEELKPLEEVLNLAQSKNFHLRPRDLISNINVIVLELKGSETTFMCEYADETATIVEFLNRWITFCQSIISTLTSGGPGPAGMKGLPGSGGGGSGGGGSGGGGSGGGGSGGGGSGGGGSEVQLVESGGGLVQPGGSLRLSCAASGFTFSSYTLAWVRQAPGKGLEWVAAIDSSSYTYSPDTVRGRFTISRDNAKNSLYLQMNSLRAEDTAVYYCARDSNWDALDYWGQGTTVTVSSSGGPGPAGMKGLPGSDIQMTQSPSSLSASVGDRVTITCKASQNVGTNVGWYQQKPGKAPKALIYSASFRYSGVPSRFSGSGSGTDFTLTISSLQPEDFATYYCQQYYTYPYTFGGGTKVEIKGGGGSGGGGSGGGGSEVQLVESGGGLVQPGNSLRLSCAASGFTFSKFGMSWVRQAPGKGLEWVSSISGSGRDTLYAESVKGRFTISRDNAKTTLYLQMNSLRPEDTAVYYCTIGGSLSVSSQGTLVTVSSGGGGSGGGGSGGGGSQVQLQESGGGLVQAGGSLRLSCAASGRIFSIDIMSWYRQAPGKQRELVARITRGGTISYDDSVKGRFTISRDNAKNTVYLQMNSLKPEDTGVYYCNALYGTDYWGKGTQVTVSSHHHHHH

SEQ ID NO: 133 - protein, 689 aa, Artificial Sequence
  source: /note="Description of Artificial Sequence: Synthetic polypeptide"
MDMRVPAQLLGLLLLWLRGARCQVQLQESGGGLVQAGGSLRLSCAASGRIFSIDIMSWYRQAPGKQRELVARITRGGTISYDDSVKGRFTISRDNAKNTVYLQMNSLKPEDTGVYYCNALYGTDYWGKGTQVTVSSGGGGSGGGGSGGGGSAPTSSSTKKTQLQLEHLLLDLQMILNGINNYKNPKLTRMLTFKFYMPKKATELKHLQCLEEELKPLEEVLNLAQSKNFHLRPRDLISNINVIVLELKGSETTFMCEYADETATIVEFLNRWITFCQSIISTLTSGGPGPAGMKGLPGSEVQLVESGGGLVQPGNSLRLSCAASGFTFSKFGMSWVRQAPGKGLEWVSSISGSGRDTLYAESVKGRFTISRDNAKTTLYLQMNSLRPEDTAVYYCTIGGSLSVSSQGTLVTVSSGGGGSGGGGSGGGGSGGGGSGGGGSGGGGSEVQLVESGGGLVQPGGSLRLSCAASGFTFSSYTLAWVRQAPGKGLEWVAAIDSSSYTYSPDTVRGRFTISRDNAKNSLYLQMNSLRAEDTAVYYCARDSNWDALDYWGQGTTVTVSSGGGGSGGGGSGGGGSDIQMTQSPSSLSASVGDRVTITCKASQNVGTNVGWYQQKPGKAPKALIYSASFRYSGVPSRFSGSGSGTDFTLTISSLQPEDFATYYCQQYYTYPYTFGGGTKVEIKHHHHHH

SEQ ID NO: 134 - protein, 545 aa, Artificial Sequence
  source: /note="Description of Artificial Sequence: Synthetic polypeptide"
MDMRVPAQLLGLLLLWLRGARCAPTSSSTKKTQLQLEHLLLDLQMILNGINNYKNPKLTRMLTFKFYMPKKATELKHLQCLEEELKPLEEVLNLAQSKNFHLRPRDLISNINVIVLELKGSETTFMCEYADETATIVEFLNRWITFCQSIISTLTSGGPGPAGMKGLPGSEVQLVESGGGLVQPGGSLRLSCAASGFTFSSYTLAWVRQAPGKGLEWVAAIDSSSYTYSPDTVRGRFTISRDNAKNSLYLQMNSLRAEDTAVYYCARDSNWDALDYWGQGTTVTVSSGGGGSGGGGSGGGGSDIQMTQSPSSLSASVGDRVTITCKASQNVGTNVGWYQQKPGKAPKALIYSASFRYSGVPSRFSGSGSGTDFTLTISSLQPEDFATYYCQQYYTYPYTFGGGTKVEIKGGGGSGGGGSGGGGSEVQLVESGGGLVQPGNSLRLSCAASGFTFSKFGMSWVRQAPGKGLEWVSSISGSGRDTLYAESVKGRFTISRDNAKTTLYLQMNSLRPEDTAVYYCTIGGSLSVSSQGTLVTVSSHHHHHH

SEQ ID NO: 135 - protein, 575 aa, Artificial Sequence
  source: /note="Description of Artificial Sequence: Synthetic polypeptide"
MDMRVPAQLLGLLLLWLRGARCAPTSSSTKKTQLQLEHLLLDLQMILNGINNYKNPKLTRMLTFKFYMPKKATELKHLQCLEEELKPLEEVLNLAQSKNFHLRPRDLISNINVIVLELKGSETTFMCEYADETATIVEFLNRWITFCQSIISTLTSGGPGPAGMKGLPGSGGGGSGGGGSGGGGSGGGGSGGGGSGGGGSEVQLVESGGGLVQPGGSLRLSCAASGFTFSSYTLAWVRQAPGKGLEWVAAIDSSSYTYSPDTVRGRFTISRDNAKNSLYLQMNSLRAEDTAVYYCARDSNWDALDYWGQGTTVTVSSGGGGSGGGGSGGGGSDIQMTQSPSSLSASVGDRVTITCKASQNVGTNVGWYQQKPGKAPKALIYSASFRYSGVPSRFSGSGSGTDFTLTISSLQPEDFATYYCQQYYTYPYTFGGGTKVEIKGGGGSGGGGSGGGGSEVQLVESGGGLVQPGNSLRLSCAASGFTFSKFGMSWVRQAPGKGLEWVSSISGSGRDTLYAESVKGRFTISRDNAKTTLYLQMNSLRPEDTAVYYCTIGGSLSVSSQGTLVTVSSHHHHHH

SEQ ID NO: 136 - protein, 421 aa, Artificial Sequence
  source: /note="Description of Artificial Sequence: Synthetic polypeptide"
MDMRVPAQLLGLLLLWLRGARCEVQLVESGGGLVQPGNSLRLSCAASGFTFSKFGMSWVRQAPGKGLEWVSSISGSGRDTLYAESVKGRFTISRDNAKTTLYLQMNSLRPEDTAVYYCTIGGSLSVSSQGTLVTVSSSGGPGPAGMKGLPGSAPTSSSTKKTQLQLEHLLLDLQMILNGINNYKNPKLTRMLTFKFYMPKKATELKHLQCLEEELKPLEEVLNLAQSKNFHLRPRDLISNINVIVLELKGSETTFMCEYADETATIVEFLNRWITFCQSIISTLTSGGPGPAGMKGLPGSEVQLVESGGGLVQPGNSLRLSCAASGFTFSKFGMSWVRQAPGKGLEWVSSISGSGRDTLYAESVKGRFTISRDNAKTTLYLQMNSLRPEDTAVYYCTIGGSLSVSSQGTLVTVSSHHHHHH

SEQ ID NO: 137 - protein, 806 aa, Artificial Sequence
  source: /note="Description of Artificial Sequence: Synthetic polypeptide"
MDMRVPAQLLGLLLLWLRGARCQVQLQESGGGLVQAGGSLRLSCAASGRIFSIDIMSWYRQAPGKQRELVARITRGGTISYDDSVKGRFTISRDNAKNTVYLQMNSLKPEDTGVYYCNALYGTDYWGKGTQVTVSSGSGSGSGSGSGSGSGSEVQLVESGGGLVQPGNSLRLSCAASGFTFSKFGMSWVRQAPGKGLEWVSSISGSGRDTLYAESVKGRFTISRDNAKTTLYLQMNSLRPEDTAVYYCTIGGSLSVSSQGTLVTVSSGSGSGSGSGSGSGSGSQVQLQESGGGLVQAGGSLRLSCAASGRIFSIDIMSWYRQAPGKQRELVARITRGGTISYDDSVKGRFTISRDNAKNTVYLQMNSLKPEDTGVYYCNALYGTDYWGKGTQVTVSSGSGSGSGSGSGSGSGSEVQLVESGGGLVQPGGSLRLSCAASGFTFSSYTLAWVRQAPGKGLEWVAAIDSSSYTYSPDTVRGRFTISRDNAKNSLYLQMNSLRAEDTAVYYCARDSNWDALDYWGQGTTVTVSSGGGGSGGGGSGGGGSDIQMTQSPSSLSASVGDRVTITCKASQNVGTNVGWYQQKPGKAPKALIYSASFRYSGVPSRFSGSGSGTDFTLTISSLQPEDFATYYCQQYYTYPYTFGGGTKVEIKSGGPGPAGMKGLPGSAPTSSSTKKTQLQLEHLLLDLQMILNGINNYKNPKLTRMLTFKFYMPKKATELKHLQCLEEELKPLEEVLNLAQSKNFHLRPRDLISNINVIVLELKGSETTFMCEYADETATIVEFLNRWITFCQSIISTLTHHHHHH

SEQ ID NO: 138 - protein, 676 aa, Artificial Sequence
  source: /note="Description of Artificial Sequence: Synthetic polypeptide"
MDMRVPAQLLGLLLLWLRGARCQVQLQESGGGLVQAGGSLRLSCAASGRIFSIDIMSWYRQAPGKQRELVARITRGGTISYDDSVKGRFTISRDNAKNTVYLQMNSLKPEDTGVYYCNALYGTDYWGKGTQVTVSSGSGSGSGSGSGSGSGSEVQLVESGGGLVQPGNSLRLSCAASGFTFSKFGMSWVRQAPGKGLEWVSSISGSGRDTLYAESVKGRFTISRDNAKTTLYLQMNSLRPEDTAVYYCTIGGSLSVSSQGTLVTVSSGSGSGSGSGSGSGSGSEVQLVESGGGLVQPGGSLRLSCAASGFTFSSYTLAWVRQAPGKGLEWVAAIDSSSYTYSPDTVRGRFTISRDNAKNSLYLQMNSLRAEDTAVYYCARDSNWDALDYWGQGTTVTVSSGGGGSGGGGSGGGGSDIQMTQSPSSLSASVGDRVTITCKASQNVGTNVGWYQQKPGKAPKALIYSASFRYSGVPSRFSGSGSGTDFTLTISSLQPEDFATYYCQQYYTYPYTFGGGTKVEIKSGGPGPAGMKGLPGSAPTSSSTKKTQLQLEHLLLDLQMILNGINNYKNPKLTRMLTFKFYMPKKATELKHLQCLEEELKPLEEVLNLAQSKNFHLRPRDLISNINVIVLELKGSETTFMCEYADETATIVEFLNRWITFCQSIISTLTHHHHHH

SEQ ID NO: 139 - protein, 421 aa, Artificial Sequence
  source: /note="Description of Artificial Sequence: Synthetic polypeptide"
MDMRVPAQLLGLLLLWLRGARCQVQLQESGGGLVQAGGSLRLSCAASGRIFSIDIMSWYRQAPGKQRELVARITRGGTISYDDSVKGRFTISRDNAKNTVYLQMNSLKPEDTGVYYCNALYGTDYWGKGTQVTVSSGSGSGSGSGSGSGSGSEVQLVESGGGLVQPGNSLRLSCAASGFTFSKFGMSWVRQAPGKGLEWVSSISGSGRDTLYAESVKGRFTISRDNAKTTLYLQMNSLRPEDTAVYYCTIGGSLSVSSQGTLVTVSSSGGPGPAGMKGLPGSAPTSSSTKKTQLQLEHLLLDLQMILNGINNYKNPKLTRMLTFKFYMPKKATELKHLQCLEEELKPLEEVLNLAQSKNFHLRPRDLISNINVIVLELKGSETTFMCEYADETATIVEFLNRWITFCQSIISTLTHHHHHH

SEQ ID NO: 140 - protein, 420 aa, Artificial Sequence
  source: /note="Description of Artificial Sequence: Synthetic polypeptide"
MDMRVPAQLLGLLLLWLRGARCQVQLQESGGGLVQAGGSLRLSCAASGRIFSIDIMSWYRQAPGKQRELVARITRGGTISYDDSVKGRFTISRDNAKNTVYLQMNSLKPEDTGVYYCNALYGTDYWGKGTQVTVSSSGGPGPAGMKGLPGSAPTSSSTKKTQLQLEHLLLDLQMILNGINNYKNPKLTRMLTFKFYMPKKATELKHLQCLEEELKPLEEVLNLAQSKNFHLRPRDLISNINVIVLELKGSETTFMCEYADETATIVEFLNRWITFCQSIISTLTSGGPGPAGMKGLPGSEVQLVESGGGLVQPGNSLRLSCAASGFTFSKFGMSWVRQAPGKGLEWVSSISGSGRDTLYAESVKGRFTISRDNAKTTLYLQMNSLRPEDTAVYYCTIGGSLSVSSQGTLVTVSSHHHHHH

SEQ ID NO: 141 - protein, 550 aa, Artificial Sequence
  source: /note="Description of Artificial Sequence: Synthetic polypeptide"
MDMRVPAQLLGLLLLWLRGARCQVQLQESGGGLVQAGGSLRLSCAASGRIFSIDIMSWYRQAPGKQRELVARITRGGTISYDDSVKGRFTISRDNAKNTVYLQMNSLKPEDTGVYYCNALYGTDYWGKGTQVTVSSGGGGSGGGGSGGGGSEVQLVESGGGLVQPGNSLRLSCAASGFTFSKFGMSWVRQAPGKGLEWVSSISGSGRDTLYAESVKGRFTISRDNAKTTLYLQMNSLRPEDTAVYYCTIGGSLSVSSQGTLVTVSSSGGPGPAGMKGLPGSAPTSSSTKKTQLQLEHLLLDLQMILNGINNYKNPKLTRMLTFKFYMPKKATELKHLQCLEEELKPLEEVLNLAQSKNFHLRPRDLISNINVIVLELKGSETTFMCEYADETATIVEFLNRWITFCQSIISTLTSGGPGPAGMKGLPGSEVQLVESGGGLVQPGNSLRLSCAASGFTFSKFGMSWVRQAPGKGLEWVSSISGSGRDTLYAESVKGRFTISRDNAKTTLYLQMNSLRPEDTAVYYCTIGGSLSVSSQGTLVTVSSHHHHHH

SEQ ID NO: 142 - protein, 420 aa, Artificial Sequence
  source: /note="Description of Artificial Sequence: Synthetic polypeptide"
MDMRVPAQLLGLLLLWLRGARCQVQLQESGGGLVQAGGSLRLSCAASGRIFSIDIMSWYRQAPGKQRELVARITRGGTISYDDSVKGRFTISRDNAKNTVYLQMNSLKPEDTGVYYCNALYGTDYWGKGTQVTVSSGGGGSGGGGSGGGGSAPTSSSTKKTQLQLEHLLLDLQMILNGINNYKNPKLTRMLTFKFYMPKKATELKHLQCLEEELKPLEEVLNLAQSKNFHLRPRDLISNINVIVLELKGSETTFMCEYADETATIVEFLNRWITFCQSIISTLTSGGPGPAGMKGLPGSEVQLVESGGGLVQPGNSLRLSCAASGFTFSKFGMSWVRQAPGKGLEWVSSISGSGRDTLYAESVKGRFTISRDNAKTTLYLQMNSLRPEDTAVYYCTIGGSLSVSSQGTLVTVSSHHHHHH

SEQ ID NO: 143 - protein, 290 aa, Artificial Sequence
  source: /note="Description of Artificial Sequence: Synthetic polypeptide"
MDMRVPAQLLGLLLLWLRGARCQVQLQESGGGLVQAGGSLRLSCAASGRIFSIDIMSWYRQAPGKQRELVARITRGGTISYDDSVKGRFTISRDNAKNTVYLQMNSLKPEDTGVYYCNALYGTDYWGKGTQVTVSSGGGGSGGGGSGGGGSAPTSSSTKKTQLQLEHLLLDLQMILNGINNYKNPKLTRMLTFKFYMPKKATELKHLQCLEEELKPLEEVLNLAQSKNFHLRPRDLISNINVIVLELKGSETTFMCEYADETATIVEFLNRWITFCQSIISTLTHHHHHH

SEQ ID NO: 144 - protein, 291 aa, Artificial Sequence
  source: /note="Description of Artificial Sequence: Synthetic polypeptide"
MDMRVPAQLLGLLLLWLRGARCAPTSSSTKKTQLQLEHLLLDLQMILNGINNYKNPKLTRMLTFKFYMPKKATELKHLQCLEEELKPLEEVLNLAQSKNFHLRPRDLISNINVIVLELKGSETTFMCEYADETATIVEFLNRWITFCQSIISTLTSGGPGPAGMKGLPGSEVQLVESGGGLVQPGNSLRLSCAASGFTFSKFGMSWVRQAPGKGLEWVSSISGSGRDTLYAESVKGRFTISRDNAKTTLYLQMNSLRPEDTAVYYCTIGGSLSVSSQGTLVTVSSHHHHHH

SEQ ID NO: 145 - protein, 689 aa, Artificial Sequence
  source: /note="Description of Artificial Sequence: Synthetic polypeptide"
MDMRVPAQLLGLLLLWLRGARCQVQLQESGGGLVQAGGSLRLSCAASGRIFSIDIMSWYRQAPGKQRELVARITRGGTISYDDSVKGRFTISRDNAKNTVYLQMNSLKPEDTGVYYCNALYGTDYWGKGTQVTVSSSGGPGPAGMKGLPGSAPTSSSTKKTQLQLEHLLLDLQMILNGINNYKNPKLTRMLTFKFYMPKKATELKHLQCLEEELKPLEEVLNLAQSKNFHLRPRDLISNINVIVLELKGSETTFMCEYADETATIVEFLNRWITFCQSIISTLTSGGPGPAGMKGLPGSEVQLVESGGGLVQPGNSLRLSCAASGFTFSKFGMSWVRQAPGKGLEWVSSISGSGRDTLYAESVKGRFTISRDNAKTTLYLQMNSLRPEDTAVYYCTIGGSLSVSSQGTLVTVSSGGGGSGGGGSGGGGSGGGGSGGGGSGGGGSEVQLVESGGGLVQPGGSLRLSCAASGFTFSSYTLAWVRQAPGKGLEWVAAIDSSSYTYSPDTVRGRFTISRDNAKNSLYLQMNSLRAEDTAVYYCARDSNWDALDYWGQGTTVTVSSGGGGSGGGGSGGGGSDIQMTQSPSSLSASVGDRVTITCKASQNVGTNVGWYQQKPGKAPKALIYSASFRYSGVPSRFSGSGSGTDFTLTISSLQPEDFATYYCQQYYTYPYTFGGGTKVEIKHHHHHH

SEQ ID NO: 146 - protein, 704 aa, Artificial Sequence
  source: /note="Description of Artificial Sequence: Synthetic polypeptide"
MDMRVPAQLLGLLLLWLRGARCAPTSSSTKKTQLQLEHLLLDLQMILNGINNYKNPKLTRMLTFKFYMPKKATELKHLQCLEEELKPLEEVLNLAQSKNFHLRPRDLISNINVIVLELKGSETTFMCEYADETATIVEFLNRWITFCQSIISTLTSGGPGPAGMKGLPGSGGGGSGGGGSGGGGSGGGGSGGGGSGGGGSEVQLVESGGGLVQPGGSLRLSCAASGFTFSSYTLAWVRQAPGKGLEWVAAIDSSSYTYSPDTVRGRFTISRDNAKNSLYLQMNSLRAEDTAVYYCARDSNWDALDYWGQGTTVTVSSGGGGSGGGGSGGGGSDIQMTQSPSSLSASVGDRVTITCKASQNVGTNVGWYQQKPGKAPKALIYSASFRYSGVPSRFSGSGSGTDFTLTISSLQPEDFATYYCQQYYTYPYTFGGGTKVEIKGGGGSGGGGSGGGGSEVQLVESGGGLVQPGNSLRLSCAASGFTFSKFGMSWVRQAPGKGLEWVSSISGSGRDTLYAESVKGRFTISRDNAKTTLYLQMNSLRPEDTAVYYCTIGGSLSVSSQGTLVTVSSGGGGSGGGGSGGGGSQVQLQESGGGLAQAGGSLSLSCAASGFTVSNSVMAWYRQTPGKQREFVAIINSVGSTNYADSVKGRFTISRDNAKNTVYLQMNNLKPEDTAVYVCNRNFDRIYWGQGTQVTVSSHHHHHH

SEQ ID NO: 147 - protein, 674 aa, Artificial Sequence
  source: /note="Description of Artificial Sequence: Synthetic polypeptide"
MDMRVPAQLLGLLLLWLRGARCQVQLQESGGGLAQAGGSLSLSCAASGFTVSNSVMAWYRQTPGKQREFVAIINSVGSTNYADSVKGRFTISRDNAKNTVYLQMNNLKPEDTAVYVCNRNFDRIYWGQGTQVTVSSAPTSSSTKKTQLQLEHLLLDLQMILNGINNYKNPKLTRMLTFKFYMPKKATELKHLQCLEEELKPLEEVLNLAQSKNFHLRPRDLISNINVIVLELKGSETTFMCEYADETATIVEFLNRWITFCQSIISTLTSGGPGPAGMKGLPGSEVQLVESGGGLVQPGNSLRLSCAASGFTFSKFGMSWVRQAPGKGLEWVSSISGSGRDTLYAESVKGRFTISRDNAKTTLYLQMNSLRPEDTAVYYCTIGGSLSVSSQGTLVTVSSGGGGSGGGGSGGGGSGGGGSGGGGSGGGGSEVQLVESGGGLVQPGGSLRLSCAASGFTFSSYTLAWVRQAPGKGLEWVAAIDSSSYTYSPDTVRGRFTISRDNAKNSLYLQMNSLRAEDTAVYYCARDSNWDALDYWGQGTTVTVSSGGGGSGGGGSGGGGSDIQMTQSPSSLSASVGDRVTITCKASQNVGTNVGWYQQKPGKAPKALIYSASFRYSGVPSRFSGSGSGTDFTLTISSLQPEDFATYYCQQYYTYPYTFGGGTKVEIKHHHHHH

SEQ ID NO: 148 - protein, 704 aa, Artificial Sequence
  source: /note="Description of Artificial Sequence: Synthetic polypeptide"
MDMRVPAQLLGLLLLWLRGARCEVQLVESGGGLVQPGGSLRLSCAASGFTFSSYTLAWVRQAPGKGLEWVAAIDSSSYTYSPDTVRGRFTISRDNAKNSLYLQMNSLRAEDTAVYYCARDSNWDALDYWGQGTTVTVSSGGGGSGGGGSGGGGSDIQMTQSPSSLSASVGDRVTITCKASQNVGTNVGWYQQKPGKAPKALIYSASFRYSGVPSRFSGSGSGTDFTLTISSLQPEDFATYYCQQYYTYPYTFGGGTKVEIKGGGGSGGGGSGGGGSGGGGSGGGGSGGGGSSGGPGPAGMKGLPGSAPTSSSTKKTQLQLEHLLLDLQMILNGINNYKNPKLTRMLTFKFYMPKKATELKHLQCLEEELKPLEEVLNLAQSKNFHLRPRDLISNINVIVLELKGSETTFMCEYADETATIVEFLNRWITFCQSIISTLTSGGPGPAGMKGLPGSEVQLVESGGGLVQPGNSLRLSCAASGFTFSKFGMSWVRQAPGKGLEWVSSISGSGRDTLYAESVKGRFTISRDNAKTTLYLQMNSLRPEDTAVYYCTIGGSLSVSSQGTLVTVSSGGGGSGGGGSGGGGSQVQLQESGGGLAQAGGSLSLSCAASGFTVSNSVMAWYRQTPGKQREFVAIINSVGSTNYADSVKGRFTISRDNAKNTVYLQMNNLKPEDTAVYVCNRNFDRIYWGQGTQVTVSSHHHHHH

SEQ ID NO: 149 - protein, 704 aa, Artificial Sequence
  source: /note="Description of Artificial Sequence: Synthetic polypeptide"
MDMRVPAQLLGLLLLWLRGARCQVQLQESGGGLAQAGGSLSLSCAASGFTVSNSVMAWYRQTPGKQREFVAIINSVGSTNYADSVKGRFTISRDNAKNTVYLQMNNLKPEDTAVYVCNRNFDRIYWGQGTQVTVSSGGGGSGGGGSGGGGSEVQLVESGGGLVQPGNSLRLSCAASGFTFSKFGMSWVRQAPGKGLEWVSSISGSGRDTLYAESVKGRFTISRDNAKTTLYLQMNSLRPEDTAVYYCTIGGSLSVSSQGTLVTVSSSGGPGPAGMKGLPGSEVQLVESGGGLVQPGGSLRLSCAASGFTFSSYTLAWVRQAPGKGLEWVAAIDSSSYTYSPDTVRGRFTISRDNAKNSLYLQMNSLRAEDTAVYYCARDSNWDALDYWGQGTTVTVSSGGGGSGGGGSGGGGSDIQMTQSPSSLSASVGDRVTITCKASQNVGTNVGWYQQKPGKAPKALIYSASFRYSGVPSRFSGSGSGTDFTLTISSLQPEDFATYYCQQYYTYPYTFGGGTKVEIKGGGGSGGGGSGGGGSGGGGSGGGGSGGGGSSGGPGPAGMKGLPGSAPTSSSTKKTQLQLEHLLLDLQMILNGINNYKNPKLTRMLTFKFYMPKKATELKHLQCLEEELKPLEEVLNLAQSKNFHLRPRDLISNINVIVLELKGSETTFMCEYADETATIVEFLNRWITFCQSIISTLTHHHHHH

SEQ ID NO: 150 - protein, 689 aa, Artificial Sequence
  source: /note="Description of Artificial Sequence: Synthetic polypeptide"
MDMRVPAQLLGLLLLWLRGARCEVQLVESGGGLVQPGGSLRLSCAASGFTFSSYTLAWVRQAPGKGLEWVAAIDSSSYTYSPDTVRGRFTISRDNAKNSLYLQMNSLRAEDTAVYYCARDSNWDALDYWGQGTTVTVSSGGGGSGGGGSGGGGSDIQMTQSPSSLSASVGDRVTITCKASQNVGTNVGWYQQKPGKAPKALIYSASFRYSGVPSRFSGSGSGTDFTLTISSLQPEDFATYYCQQYYTYPYTFGGGTKVEIKGGGGSGGGGSGGGGSGGGGSGGGGSGGGGSEVQLVESGGGLVQPGNSLRLSCAASGFTFSKFGMSWVRQAPGKGLEWVSSISGSGRDTLYAESVKGRFTISRDNAKTTLYLQMNSLRPEDTAVYYCTIGGSLSVSSQGTLVTVSSSGGPGPAGMKGLPGSAPTSSSTKKTQLQLEHLLLDLQMILNGINNYKNPKLTRMLTFKFYMPKKATELKHLQCLEEELKPLEEVLNLAQSKNFHLRPRDLISNINVIVLELKGSETTFMCEYADETATIVEFLNRWITFCQSIISTLTGGGGSGGGGSGGGGSQVQLQESGGGLAQAGGSLSLSCAASGFTVSNSVMAWYRQTPGKQREFVAIINSVGSTNYADSVKGRFTISRDNAKNTVYLQMNNLKPEDTAVYVCNRNFDRIYWGQGTQVTVSSHHHHHH

SEQ ID NO: 151 - protein, 700 aa, Artificial Sequence
  source: /note="Description of Artificial Sequence: Synthetic polypeptide"
MDMRVPAQLLGLLLLWLRGARCQVQLQESGGGLVQAGGSLRLSCAASGRIFSIDIMSWYRQAPGKQRELVARITRGGTISYDDSVKGRFTISRDNAKNTVYLQMNSLKPEDTGVYYCNALYGTDYWGKGTQVTVSSGGGGSGGGGSGGGGSAPTSSSTKKTQLQLEHLLLDLQMILNGINNYKNPKLTRMLTFKFYMPKKATELKHLQCLEEELKPLEEVLNLAQSKNFHLRPRDLISNINVIVLELKGSETTFMCEYADETATIVEFLNRWITFCQSIISTLTSGGPGPAGMKGLPGSRGETGPAAPGSEVQLVESGGGLVQPGNSLRLSCAASGFTFSKFGMSWVRQAPGKGLEWVSSISGSGRDTLYAESVKGRFTISRDNAKTTLYLQMNSLRPEDTAVYYCTIGGSLSVSSQGTLVTVSSGGGGSGGGGSGGGGSGGGGSGGGGSGGGGSEVQLVESGGGLVQPGGSLRLSCAASGFTFSSYTLAWVRQAPGKGLEWVAAIDSSSYTYSPDTVRGRFTISRDNAKNSLYLQMNSLRAEDTAVYYCARDSNWDALDYWGQGTTVTVSSGGGGSGGGGSGGGGSDIQMTQSPSSLSASVGDRVTITCKASQNVGTNVGWYQQKPGKAPKALIYSASFRYSGVPSRFSGSGSGTDFTLTISSLQPEDFATYYCQQYYTYPYTFGGGTKVEIKHHHHHH

SEQ ID NO: 152 - protein, 276 aa, Artificial Sequence; identical to SEQ ID NO: 102
  source: /note="Description of Artificial Sequence: Synthetic polypeptide"

SEQ ID NO: 153 - protein, 279 aa, Artificial Sequence
  source: /note="Description of Artificial Sequence: Synthetic polypeptide"
MDMRVPAQLLGLLLLWLRGARCQVQLQQSGAELVRPGTSVKVSCKASGYAFTNYLIEWVKQRPGQGLEWIGVINPGSGGTNYNEKFKGKATLTADKSSSTAYMQLSSLTSDDSAVYFCARWRGDGYYAYFDVWGAGTTVTVSSGGGGSGGGGSGGGGSDIVLTQSPASLAVSLGQRATISCKASQSVDYDGDSYMNWYQQKPGQPPKLLIYAASNLESGIPARFSGSGSGTDFTLNIHPVEEEDAATYYCQQSNEDPYTFGGGTKLEIKHHHHHHEPEA

SEQ ID NO: 154 - protein, 279 aa, Artificial Sequence
  source: /note="Description of Artificial Sequence: Synthetic polypeptide"
MDMRVPAQLLGLLLLWLRGARCQVQLQQSGAELVRPGTSVKVSCKASGYAFTNYLIEWVKQRPGQGLEWIGVINPGSGGTNYNEKFKGKATLTADKSSSTAYMQLSSLTSDDSAVYFCARWRGDGYYAYFDVWGAGTTVTVSSSGGPGPAGMKGLPGSDIVLTQSPASLAVSLGQRATISCKASQSVDYDGDSYMNWYQQKPGQPPKLLIYAASNLESGIPARFSGSGSGTDFTLNIHPVEEEDAATYYCQQSNEDPYTFGGGTKLEIKHHHHHHEPEA

SEQ ID NO: 155 - protein, 279 aa, Artificial Sequence
  source: /note="Description of Artificial Sequence: Synthetic polypeptide"
MDMRVPAQLLGLLLLWLRGARCDIVLTQSPASLAVSLGQRATISCKASQSVDYDGDSYMNWYQQKPGQPPKLLIYAASNLESGIPARFSGSGSGTDFTLNIHPVEEEDAATYYCQQSNEDPYTFGGGTKLEIKGGGGSGGGGSGGGGSQVQLQQSGAELVRPGTSVKVSCKASGYAFTNYLIEWVKQRPGQGLEWIGVINPGSGGTNYNEKFKGKATLTADKSSSTAYMQLSSLTSDDSAVYFCARWRGDGYYAYFDVWGAGTTVTVSSHHHHHHEPEA

SEQ ID NO: 156 - protein, 279 aa, Artificial Sequence
  source: /note="Description of Artificial Sequence: Synthetic polypeptide"
MDMRVPAQLLGLLLLWLRGARCDIVLTQSPASLAVSLGQRATISCKASQSVDYDGDSYMNWYQQKPGQPPKLLIYAASNLESGIPARFSGSGSGTDFTLNIHPVEEEDAATYYCQQSNEDPYTFGGGTKLEIKSGGPGPAGMKGLPGSQVQLQQSGAELVRPGTSVKVSCKASGYAFTNYLIEWVKQRPGQGLEWIGVINPGSGGTNYNEKFKGKATLTADKSSSTAYMQLSSLTSDDSAVYFCARWRGDGYYAYFDVWGAGTTVTVSSHHHHHHEPEA

SEQ ID NO: 157 - protein, 295 aa, Artificial Sequence
  source: /note="Description of Artificial Sequence: Synthetic polypeptide"
MDMRVPAQLLGLLLLWLRGARCAPTSSSTKKTQLQLEHLLLDLQMILNGINNYKNPKLTRMLTFKFYMPKKATELKHLQCLEEELKPLEEVLNLAQSKNFHLRPRDLISNINVIVLELKGSETTFMCEYADETATIVEFLNRWITFCQSIISTLTGGGGSGGGGSGGGGSEVQLVESGGGLVQPGNSLRLSCAASGFTFSKFGMSWVRQAPGKGLEWVSSISGSGRDTLYAESVKGRFTISRDNAKTTLYLQMNSLRPEDTAVYYCTIGGSLSVSSQGTLVTVSSHHHHHHEPEA

SEQ ID NO: 158 - protein, 765 aa, Artificial Sequence
  source: /note="Description of Artificial Sequence: Synthetic polypeptide"
MDMRVPAQLLGLLLLWLRGARCAPTSSSTKKTQLQLEHLLLDLQMILNGINNYKNPKLTRMLTFKFYMPKKATELKHLQCLEEELKPLEEVLNLAQSKNFHLRPRDLISNINVIVLELKGSETTFMCEYADETATIVEFLNRWITFCQSIISTLTGGGGSGGGGSGGGGSDAHKSEVAHRFKDLGEENFKALVLIAFAQYLQQCPFEDHVKLVNEVTEFAKTCVADESAENCDKSLHTLFGDKLCTVATLRETYGEMADCCAKQEPERNECFLQHKDDNPNLPRLVRPEVDVMCTAFHDNEETFLKKYLYEIARRHPYFYAPELLFFAKRYKAAFTECCQAADKAACLLPKLDELRDEGKASSAKQRLKCASLQKFGERAFKAWAVARLSQRFPKAEFAEVSKLVTDLTKVHTECCHGDLLECADDRADLAKYICENQDSISSKLKECCEKPLLEKSHCIAEVENDEMPADLPSLAADFVESKDVCKNYAEAKDVFLGMFLYEYARRHPDYSVVLLLRLAKTYETTLEKCCAAADPHECYAKVFDEFKPLVEEPQNLIKQNCELFEQLGEYKFQNALLVRYTKKVPQVSTPTLVEVSRNLGKVGSKCCKHPEAKRMPCAEDYLSVVLNQLCVLHEKTPVSDRVTKCCTESLVNRRPCFSALEVDETYVPKEFNAETFTFHADICTLSEKERQIKKQTALVELVKHKPKATKEQLKAVMDDFAAFVEKCCKADDKETCFAEEGKKLVAASQAALGLHHHHHHEPEA

SEQ ID NO: 159 - protein, 765 aa, Artificial Sequence; identical to SEQ ID NO: 158
  source: /note="Description of Artificial Sequence: Synthetic polypeptide"

SEQ ID NO: 160 - protein, 765 aa, Artificial Sequence
  source: /note="Description of Artificial Sequence: Synthetic polypeptide"
MDMRVPAQLLGLLLLWLRGARCAPTSSSTKKTQLQLEHLLLDLQMILNGINNYKNPKLTRMLTFKFYMPKKATELKHLQCLEEELKPLEEVLNLAQSKNFHLRPRDLISNINVIVLELKGSETTFMCEYADETATIVEFLNRWITFCQSIISTLTSGGPGPAGMKGLPGSDAHKSEVAHRFKDLGEENFKALVLIAFAQYLQQCPFEDHVKLVNEVTEFAKTCVADESAENCDKSLHTLFGDKLCTVATLRETYGEMADCCAKQEPERNECFLQHKDDNPNLPRLVRPEVDVMCTAFHDNEETFLKKYLYEIARRHPYFYAPELLFFAKRYKAAFTECCQAADKAACLLPKLDELRDEGKASSAKQRLKCASLQKFGERAFKAWAVARLSQRFPKAEFAEVSKLVTDLTKVHTECCHGDLLECADDRADLAKYICENQDSISSKLKECCEKPLLEKSHCIAEVENDEMPADLPSLAADFVESKDVCKNYAEAKDVFLGMFLYEYARRHPDYSVVLLLRLAKTYETTLEKCCAAADPHECYAKVFDEFKPLVEEPQNLIKQNCELFEQLGEYKFQNALLVRYTKKVPQVSTPTLVEVSRNLGKVGSKCCKHPEAKRMPCAEDYLSVVLNQLCVLHEKTPVSDRVTKCCTESLVNRRPCFSALEVDETYVPKEFNAETFTFHADICTLSEKERQIKKQTALVELVKHKPKATKEQLKAVMDDFAAFVEKCCKADDKETCFAEEGKKLVAASQAALGLHHHHHHEPEA

SEQ ID NO: 161 - protein, 708 aa, Artificial Sequence
  source: /note="Description of Artificial Sequence: Synthetic polypeptide"
MDMRVPAQLLGLLLLWLRGARCAPTSSSTKKTQLQLEHLLLDLQMILNGINNYKNPKLTRMLTFKFYMPKKATELKHLQCLEEELKPLEEVLNLAQSKNFHLRPRDLISNINVIVLELKGSETTFMCEYADETATIVEFLNRWITFCQSIISTLTSGGPGPAGMKGLPGSEVQLVESGGGLVQPGNSLRLSCAASGFTFSKFGMSWVRQAPGKGLEWVSSISGSGRDTLYAESVKGRFTISRDNAKTTLYLQMNSLRPEDTAVYYCTIGGSLSVSSQGTLVTVSSGGGGSGGGGSGGGGSGGGGSGGGGSGGGGSSGGPGPAGMKGLPGSEVQLVESGGGLVQPGGSLRLSCAASGFTFSSYTLAWVRQAPGKGLEWVAAIDSSSYTYSPDTVRGRFTISRDNAKNSLYLQMNSLRAEDTAVYYCARDSNWDALDYWGQGTTVTVSSGGGGSGGGGSGGGGSDIQMTQSPSSLSASVGDRVTITCKASQNVGTNVGWYQQKPGKAPKALIYSASFRYSGVPSRFSGSGSGTDFTLTISSLQPEDFATYYCQQYYTYPYTFGGGTKVEIKGGGGSGGGGSGGGGSQVQLQESGGGLAQAGGSLSLSCAASGFTVSNSVMAWYRQTPGKQREFVAIINSVGSTNYADSVKGRFTISRDNAKNTVYLQMNNLKPEDTAVYVCNRNFDRIYWGQGTQVTVSSHHHHHHEPEA

SEQ ID NO: 162 - protein, 708 aa, Artificial Sequence
  source: /note="Description of Artificial Sequence: Synthetic polypeptide"
MDMRVPAQLLGLLLLWLRGARCQVQLQESGGGLAQAGGSLSLSCAASGFTVSNSVMAWYRQTPGKQREFVAIINSVGSTNYADSVKGRFTISRDNAKNTVYLQMNNLKPEDTAVYVCNRNFDRIYWGQGTQVTVSSGGGGSGGGGSGGGGSAPTSSSTKKTQLQLEHLLLDLQMILNGINNYKNPKLTRMLTFKFYMPKKATELKHLQCLEEELKPLEEVLNLAQSKNFHLRPRDLISNINVIVLELKGSETTFMCEYADETATIVEFLNRWITFCQSIISTLTSGGPGPAGMKGLPGSEVQLVESGGGLVQPGNSLRLSCAASGFTFSKFGMSWVRQAPGKGLEWVSSISGSGRDTLYAESVKGRFTISRDNAKTTLYLQMNSLRPEDTAVYYCTIGGSLSVSSQGTLVTVSSGGGGSGGGGSGGGGSGGGGSGGGGSGGGGSSGGPGPAGMKGLPGSEVQLVESGGGLVQPGGSLRLSCAASGFTFSSYTLAWVRQAPGKGLEWVAAIDSSSYTYSPDTVRGRFTISRDNAKNSLYLQMNSLRAEDTAVYYCARDSNWDALDYWGQGTTVTVSSGGGGSGGGGSGGGGSDIQMTQSPSSLSASVGDRVTITCKASQNVGTNVGWYQQKPGKAPKALIYSASFRYSGVPSRFSGSGSGTDFTLTISSLQPEDFATYYCQQYYTYPYTFGGGTKVEIKHHHHHHEPEA

SEQ ID NO: 163 - protein, 708 aa, Artificial Sequence
  source: /note="Description of Artificial Sequence: Synthetic polypeptide"
MDMRVPAQLLGLLLLWLRGARCQVQLQESGGGLAQAGGSLSLSCAASGFTVSNSVMAWYRQTPGKQREFVAIINSVGSTNYADSVKGRFTISRDNAKNTVYLQMNNLKPEDTAVYVCNRNFDRIYWGQGTQVTVSSSGGPGPAGMKGLPGSAPTSSSTKKTQLQLEHLLLDLQMILNGINNYKNPKLTRMLTFKFYMPKKATELKHLQCLEEELKPLEEVLNLAQSKNFHLRPRDLISNINVIVLELKGSETTFMCEYADETATIVEFLNRWITFCQSIISTLTSGGPGPAGMKGLPGSEVQLVESGGGLVQPGNSLRLSCAASGFTFSKFGMSWVRQAPGKGLEWVSSISGSGRDTLYAESVKGRFTISRDNAKTTLYLQMNSLRPEDTAVYYCTIGGSLSVSSQGTLVTVSSGGGGSGGGGSGGGGSGGGGSGGGGSGGGGSSGGPGPAGMKGLPGSEVQLVESGGGLVQPGGSLRLSCAASGFTFSSYTLAWVRQAPGKGLEWVAAIDSSSYTYSPDTVRGRFTISRDNAKNSLYLQMNSLRAEDTAVYYCARDSNWDALDYWGQGTTVTVSSGGGGSGGGGSGGGGSDIQMTQSPSSLSASVGDRVTITCKASQNVGTNVGWYQQKPGKAPKALIYSASFRYSGVPSRFSGSGSGTDFTLTISSLQPEDFATYYCQQYYTYPYTFGGGTKVEIKHHHHHHEPEA

SEQ ID NO: 164 - protein, 161 aa, Artificial Sequence
  source: /note="Description of Artificial Sequence: Synthetic polypeptide"
MDMRVPAQLLGLLLLWLRGARCAPTSSSTKKTQLQLEHLLLDLQMILNGINNYKNPKLTRMLTFKFYMPKKATELKHLQCLEEELKPLEEVLNLAQSKNFHLRPRDLISNINVIVLELKGSETTFMCEYADETATIVEFLNRWITFCQSIISTLTHHHHHH

SEQ ID NO: 165 - protein, 708 aa, Artificial Sequence
  source: /note="Description of Artificial Sequence: Synthetic polypeptide"
MDMRVPAQLLGLLLLWLRGARCAPTSSSTKKTQLQLEHLLLDLQMILNGINNYKNPKLTRMLTFKFYMPKKATELKHLQCLEEELKPLEEVLNLAQSKNFHLRPRDLISNINVIVLELKGSETTFMCEYADETATIVEFLNRWITFCQSIISTLTSGGPGPAGMKGLPGSEVQLVESGGGLVQPGNSLRLSCAASGFTFSKFGMSWVRQAPGKGLEWVSSISGSGRDTLYAESVKGRFTISRDNAKTTLYLQMNSLRPEDTAVYYCTIGGSLSVSSQGTLVTVSSGGGGSGGGGSGGGGSGGGGSGGGGSGGGGSSGGPGPAGMKGLPGSEVQLVESGGGLVQPGGSLRLSCAASGFTFSSYTLAWVRQAPGKGLEWVAAIDSSSYTYSPDTVRGRFTISRDNAKNSLYLQMNSLRAEDTAVYYCARDSNWDALDYWGQGTTVTVSSGGGGSGGGGSGGGGSDIQMTQSPSSLSASVGDRVTITCKASQNVGTNVGWYQQKPGKAPKALIYSASFRYSGVPSRFSGSGSGTDFTLTISSLQPEDFATYYCQQYYTYPYTFGGGTKVEIKGGGGSGGGGSGGGGSQVQLQESGGGLVQAGGSLRLSCAASGRIFSIDIMSWYRQAPGKQRELVARITRGGTISYDDSVKGRFTISRDNAKNTVYLQMNSLKPEDTGVYYCNALYGTDYWGKGTQVTVSSHHHHHHEPEA

SEQ ID NO: 166 - protein, 708 aa, Artificial Sequence
  source: /note="Description of Artificial Sequence: Synthetic polypeptide"
MDMRVPAQLLGLLLLWLRGARCQVQLQESGGGLVQAGGSLRLSCAASGRIFSIDIMSWYRQAPGKQRELVARITRGGTISYDDSVKGRFTISRDNAKNTVYLQMNSLKPEDTGVYYCNALYGTDYWGKGTQVTVSSGGGGSGGGGSGGGGSAPTSSSTKKTQLQLEHLLLDLQMILNGINNYKNPKLTRMLTFKFYMPKKATELKHLQCLEEELKPLEEVLNLAQSKNFHLRPRDLISNINVIVLELKGSETTFMCEYADETATIVEFLNRWITFCQSIISTLTSGGPGPAGMKGLPGSEVQLVESGGGLVQPGNSLRLSCAASGFTFSKFGMSWVRQAPGKGLEWVSSISGSGRDTLYAESVKGRFTISRDNAKTTLYLQMNSLRPEDTAVYYCTIGGSLSVSSQGTLVTVSSGGGGSGGGGSGGGGSGGGGSGGGGSGGGGSSGGPGPAGMKGLPGSEVQLVESGGGLVQPGGSLRLSCAASGFTFSSYTLAWVRQAPGKGLEWVAAIDSSSYTYSPDTVRGRFTISRDNAKNSLYLQMNSLRAEDTAVYYCARDSNWDALDYWGQGTTVTVSSGGGGSGGGGSGGGGSDIQMTQSPSSLSASVGDRVTITCKASQNVGTNVGWYQQKPGKAPKALIYSASFRYSGVPSRFSGSGSGTDFTLTISSLQPEDFATYYCQQYYTYPYTFGGGTKVEIKHHHHHHEPEA

SEQ ID NO: 167 - protein, 708 aa, Artificial Sequence
  source: /note="Description of Artificial Sequence: Synthetic polypeptide"
MDMRVPAQLLGLLLLWLRGARCQVQLQESGGGLVQAGGSLRLSCAASGRIFSIDIMSWYRQAPGKQRELVARITRGGTISYDDSVKGRFTISRDNAKNTVYLQMNSLKPEDTGVYYCNALYGTDYWGKGTQVTVSSSGGPGPAGMKGLPGSAPTSSSTKKTQLQLEHLLLDLQMILNGINNYKNPKLTRMLTFKFYMPKKATELKHLQCLEEELKPLEEVLNLAQSKNFHLRPRDLISNINVIVLELKGSETTFMCEYADETATIVEFLNRWITFCQSIISTLTSGGPGPAGMKGLPGSEVQLVESGGGLVQPGNSLRLSCAASGFTFSKFGMSWVRQAPGKGLEWVSSISGSGRDTLYAESVKGRFTISRDNAKTTLYLQMNSLRPEDTAVYYCTIGGSLSVSSQGTLVTVSSGGGGSGGGGSGGGGSGGGGSGGGGSGGGGSSGGPGPAGMKGLPGSEVQLVESGGGLVQPGGSLRLSCAASGFTFSSYTLAWVRQAPGKGLEWVAAIDSSSYTYSPDTVRGRFTISRDNAKNSLYLQMNSLRAEDTAVYYCARDSNWDALDYWGQGTTVTVSSGGGGSGGGGSGGGGSDIQMTQSPSSLSASVGDRVTITCKASQNVGTNVGWYQQKPGKAPKALIYSASFRYSGVPSRFSGSGSGTDFTLTISSLQPEDFATYYCQQYYTYPYTFGGGTKVEIKHHHHHHEPEA

SEQ ID NO: 168 - protein, 450 aa, Artificial Sequence
  source: /note="Description of Artificial Sequence: Synthetic polypeptide"
MDMRVPAQLLGLLLLWLRGARCEVQLVESGGGLVQPGNSLRLSCAASGFTFSKFGMSWVRQAPGKGLEWVSSISGSGRDTLYAESVKGRFTISRDNAKTTLYLQMNSLRPEDTAVYYCTIGGSLSVSSQGTLVTVSSSGGPGPAGMKGLPGSCDLPQTHNLRNKRALTLLVQMRRLSPLSCLKDRKDFGFPQEKVDAQQIKKAQAIPVLSELTQQILNIFTSKDSSAAWNTTLLDSFCNDLHQQLNDLQGCLMQQVGVQEFPLTQEDALLAVRKYFHRITVYLREKKHSPCAWEVVRAEVWRALSSSANVSGGPGPAGMKGLPGSEVQLVESGGGLVQPGNSLRLSCAASGFTFSKFGMSWVRQAPGKGLEWVSSISGSGRDTLYAESVKGRFTISRDNAKTTLYLQMNSLRPEDTAVYYCTIGGSLSVSSQGTLVTVSSHHHHHHEPEA

SEQ ID NO: 169 - protein, 198 aa, Artificial Sequence
  source: /note="Description of Artificial Sequence: Synthetic polypeptide"
MDMRVPAQLLGLLLLWLRGARCCDLPQTHNLRNKRALTLLVQMRRLSPLSCLKDRKDFGFPQEKVDAQQIKKAQAIPVLSELTQQILNIFTSKDSSAAWNTTLLDSFCNDLHQQLNDLQGCLMQQVGVQEFPLTQEDALLAVRKYFHRITVYLREKKHSPCAWEVVRAEVWRALSSSANVLGRLREEKHHHHHHEPEA

SEQ ID NO: 170 - protein, 328 aa, Artificial Sequence
  source: /note="Description of Artificial Sequence: Synthetic polypeptide"
MDMRVPAQLLGLLLLWLRGARCEVQLVESGGGLVQPGNSLRLSCAASGFTFSKFGMSWVRQAPGKGLEWVSSISGSGRDTLYAESVKGRFTISRDNAKTTLYLQMNSLRPEDTAVYYCTIGGSLSVSSQGTLVTVSSSGGPGPAGMKGLPGSCDLPQTHNLRNKRALTLLVQMRRLSPLSCLKDRKDFGFPQEKVDAQQIKKAQAIPVLSELTQQILNIFTSKDSSAAWNTTLLDSFCNDLHQQLNDLQGCLMQQVGVQEFPLTQEDALLAVRKYFHRITVYLREKKHSPCAWEVVRAEVWRALSSSANVLGRLREEKHHHHHHEPEA

SEQ ID NO: 171 - protein, 328 aa, Artificial Sequence
  source: /note="Description of Artificial Sequence: Synthetic polypeptide"
MDMRVPAQLLGLLLLWLRGARCCDLPQTHNLRNKRALTLLVQMRRLSPLSCLKDRKDFGFPQEKVDAQQIKKAQAIPVLSELTQQILNIFTSKDSSAAWNTTLLDSFCNDLHQQLNDLQGCLMQQVGVQEFPLTQEDALLAVRKYFHRITVYLREKKHSPCAWEVVRAEVWRALSSSANVLGRLREEKSGGPGPAGMKGLPGSEVQLVESGGGLVQPGNSLRLSCAASGFTFSKFGMSWVRQAPGKGLEWVSSISGSGRDTLYAESVKGRFTISRDNAKTTLYLQMNSLRPEDTAVYYCTIGGSLSVSSQGTLVTVSSHHHHHHEPEA

SEQ ID NO: 172 - protein, 1396 aa, Artificial Sequence
  source: /note="Description of Artificial Sequence: Synthetic polypeptide"
MDMRVPAQLLGLLLLWLRGARCEAHKSEIAHRYNDLGEQHFKGLVLIAFSQYLQKCSYDEHAKLVQEVTDFAKTCVADESAANCDKSLHTLFGDKLCAIPNLRENYGELADCCTKQEPERNECFLQHKDDNPSLPPFERPEAEAMCTSFKENPTTFMGHYLHEVARRHPYFYAPELLYYAEQYNEILTQCCAEADKESCLTPKLDGVKEKALVSSVRQRMKCSSMQKFGERAFKAWAVARLSQTFPNADFAEITKLATDLTKVNKECCHGDLLECADDRAELAKYMCENQATISSKLQTCCDKPLLKKAHCLSEVEHDTMPADLPAIAADFVEDQEVCKNYAEAKDVFLGTFLYEYSRRHPDYSVSLLLRLAKKYEATLEKCCAEANPPACYGTVLAEFQPLVEEPKNLVKTNCDLYEKLGEYGFQNAILVRYTQKAPQVSTPTLVEAARNLGRVGTKCCTLPEDQRLPCVEDYLSAILNRVCLLHEKTPVSEHVTKCCSGSLVERRPCFSALTVDETYVPKEFKAETFTFHSDICTLPEKEKQIKKQTALAELVKHKPKATAEQLKTVMDDFAQFLDTCCKAADKDTCFSTEGPNLVTRCKDALASGGPGPAGMKGLPGSCDLPQTHNLRNKRALTLLVQMRRLSPLSCLKDRKDFGFPQEKVDAQQIKKAQAIPVLSELTQQILNIFTSKDSSAAWNTTLLDSFCNDLHQQLNDLQGCLMQQVGVQEFPLTQEDALLAVRKYFHRITVYLREKKHSPCAWEVVRAEVWRALSSSANVLGRLREEKSGGPGPAGMKGLPGSEAHKSEIAHRYNDLGEQHFKGLVLIAFSQYLQKCSYDEHAKLVQEVTDFAKTCVADESAANCDKSLHTLFGDKLCAIPNLRENYGELADCCTKQEPERNECFLQHKDDNPSLPPFERPEAEAMCTSFKENPTTFMGHYLHEVARRHPYFYAPELLYYAEQYNEILTQCCAEADKESCLTPKLDGVKEKALVSSVRQRMKCSSMQKFGERAFKAWAVARLSQTFPNADFAEITKLATDLTKVNKECCHGDLLECADDRAELAKYMCENQATISSKLQTCCDKPLLKKAHCLSEVEHDTMPADLPAIAADFVEDQEVCKNYAEAKDVFLGTFLYEYSRRHPDYSVSLLLRLAKKYEATLEKCCAEANPPACYGTVLAEFQPLVEEPKNLVKTNCDLYEKLGEYGFQNAILVRYTQKAPQVSTPTLVEAARNLGRVGTKCCTLPEDQRLPCVEDYLSAILNRVCLLHEKTPVSEHVTKCCSGSLVERRPCFSALTVDETYVPKEFKAETFTFHSDICTLPEKEKQIKKQTALAELVKHKPKATAEQLKTVMDDFAQFLDTCCKAADKDTCFSTEGPNLVTRCKDALAHHHHHHEPEA

SEQ ID NO: 173 - protein, 797 aa, Artificial Sequence
  source: /note="Description of Artificial Sequence: Synthetic polypeptide"
MDMRVPAQLLGLLLLWLRGARCEAHKSEIAHRYNDLGEQHFKGLVLIAFSQYLQKCSYDEHAKLVQEVTDFAKTCVADESAANCDKSLHTLFGDKLCAIPNLRENYGELADCCTKQEPERNECFLQHKDDNPSLPPFERPEAEAMCTSFKENPTTFMGHYLHEVARRHPYFYAPELLYYAEQYNEILTQCCAEADKESCLTPKLDGVKEKALVSSVRQRMKCSSMQKFGERAFKAWAVARLSQTFPNADFAEITKLATDLTKVNKECCHGDLLECADDRAELAKYMCENQATISSKLQTCCDKPLLKKAHCLSEVEHDTMPADLPAIAADFVEDQEVCKNYAEAKDVFLGTFLYEYSRRHPDYSVSLLLRLAKKYEATLEKCCAEANPPACYGTVLAEFQPLVEEPKNLVKTNCDLYEKLGEYGFQNAILVRYTQKAPQVSTPTLVEAARNLGRVGTKCCTLPEDQRLPCVEDYLSAILNRVCLLHEKTPVSEHVTKCCSGSLVERRPCFSALTVDETYVPKEFKAETFTFHSDICTLPEKEKQIKKQTALAELVKHKPKATAEQLKTVMDDFAQFLDTCCKAADKDTCFSTEGPNLVTRCKDALASGGPGPAGMKGLPGSCDLPQTHNLRNKRALTLLVQMRRLSPLSCLKDRKDFGFPQEKVDAQQIKKAQAIPVLSELTQQILNIFTSKDSSAAWNTTLLDSFCNDLHQQLNDLQGCLMQQVGVQEFPLTQEDALLAVRKYFHRITVYLREKKHSPCAWEVVRAEVWRALSSSANVLGRLREEKHHHHHHEPEA

SEQ ID NO: 174 - protein, 797 aa, Artificial Sequence
  source: /note="Description of Artificial Sequence: Synthetic polypeptide"
MDMRVPAQLLGLLLLWLRGARCCDLPQTHNLRNKRALTLLVQMRRLSPLSCLKDRKDFGFPQEKVDAQQIKKAQAIPVLSELTQQILNIFTSKDSSAAWNTTLLDSFCNDLHQQLNDLQGCLMQQVGVQEFPLTQEDALLAVRKYFHRITVYLREKKHSPCAWEVVRAEVWRALSSSANVLGRLREEKSGGPGPAGMKGLPGSEAHKSEIAHRYNDLGEQHFKGLVLIAFSQYLQKCSYDEHAKLVQEVTDFAKTCVADESAANCDKSLHTLFGDKLCAIPNLRENYGELADCCTKQEPERNECFLQHKDDNPSLPPFERPEAEAMCTSFKENPTTFMGHYLHEVARRHPYFYAPELLYYAEQYNEILTQCCAEADKESCLTPKLDGVKEKALVSSVRQRMKCSSMQKFGERAFKAWAVARLSQTFPNADFAEITKLATDLTKVNKECCHGDLLECADDRAELAKYMCENQATISSKLQTCCDKPLLKKAHCLSEVEHDTMPADLPAIAADFVEDQEVCKNYAEAKDVFLGTFLYEYSRRHPDYSVSLLLRLAKKYEATLEKCCAEANPPACYGTVLAEFQPLVEEPKNLVKTNCDLYEKLGEYGFQNAILVRYTQKAPQVSTPTLVEAARNLGRVGTKCCTLPEDQRLPCVEDYLSAILNRVCLLHEKTPVSEHVTKCCSGSLVERRPCFSALTVDETYVPKEFKAETFTFHSDICTLPEKEKQIKKQTALAELVKHKPKATAEQLKTVMDDFAQFLDTCCKAADKDTCFSTEGPNLVTRCKDALAHHHHHHEPEA

SEQ ID NO: 175 - protein, 587 aa, Artificial Sequence
  source: /note="Description of Artificial Sequence: Synthetic polypeptide"
MDMRVPAQLLGLLLLWLRGARCQVQLQESGGGLAQAGGSLSLSCAASGFTVSNSVMAWYRQTPGKQREFVAIINSVGSTNYADSVKGRFTISRDNAKNTVYLQMNNLKPEDTAVYVCNRNFDRIYWGQGTQVTVSSGGGGSGGGGSGGGGSEVQLVESGGGLVQPGNSLRLSCAASGFTFSKFGMSWVRQAPGKGLEWVSSISGSGRDTLYAESVKGRFTISRDNAKTTLYLQMNSLRPEDTAVYYCTIGGSLSVSSQGTLVTVSSSGGPGPAGMKGLPGSCDLPQTHNLRNKRALTLLVQMRRLSPLSCLKDRKDFGFPQEKVDAQQIKKAQAIPVLSELTQQILNIFTSKDSSAAWNTTLLDSFCNDLHQQLNDLQGCLMQQVGVQEFPLTQEDALLAVRKYFHRITVYLREKKHSPCAWEVVRAEVWRALSSSANVLGRLREEKSGGPGPAGMKGLPGSEVQLVESGGGLVQPGNSLRLSCAASGFTFSKFGMSWVRQAPGKGLEWVSSISGSGRDTLYAESVKGRFTISRDNAKTTLYLQMNSLRPEDTAVYYCTIGGSLSVSSQGTLVTVSSHHHHHHEPEA

SEQ ID NO: 176 - protein, 587 aa, Artificial Sequence
  source: /note="Description of Artificial Sequence: Synthetic polypeptide"
MDMRVPAQLLGLLLLWLRGARCEVQLVESGGGLVQPGNSLRLSCAASGFTFSKFGMSWVRQAPGKGLEWVSSISGSGRDTLYAESVKGRFTISRDNAKTTLYLQMNSLRPEDTAVYYCTIGGSLSVSSQGTLVTVSSSGGPGPAGMKGLPGSCDLPQTHNLRNKRALTLLVQMRRLSPLSCLKDRKDFGFPQEKVDAQQIKKAQAIPVLSELTQQILNIFTSKDSSAAWNTTLLDSFCNDLHQQLNDLQGCLMQQVGVQEFPLTQEDALLAVRKYFHRITVYLREKKHSPCAWEVVRAEVWRALSSSANVLGRLREEKSGGPGPAGMKGLPGSEVQLVESGGGLVQPGNSLRLSCAASGFTFSKFGMSWVRQAPGKGLEWVSSISGSGRDTLYAESVKGRFTISRDNAKTTLYLQMNSLRPEDTAVYYCTIGGSLSVSSQGTLVTVSSGGGGSGGGGSGGGGSQVQLQESGGGLAQAGGSLSLSCAASGFTVSNSVMAWYRQTPGKQREFVAIINSVGSTNYADSVKGRFTISRDNAKNTVYLQMNNLKPEDTAVYVCNRNFDRIYWGQGTQVTVSSHHHHHHEPEA

SEQ ID NO: 177 - protein, 458 aa, Artificial Sequence
  source: /note="Description of Artificial Sequence: Synthetic polypeptide"
MDMRVPAQLLGLLLLWLRGARCEVQLVESGGGLVQPGNSLRLSCAASGFTFSKFGMSWVRQAPGKGLEWVSSISGSGRDTLYAESVKGRFTISRDNAKTTLYLQMNSLRPEDTAVYYCTIGGSLSVSSQGTLVTVSSGGGGSGGGGSGGGGSCDLPQTHNLRNKRALTLLVQMRRLSPLSCLKDRKDFGFPQEKVDAQQIKKAQAIPVLSELTQQILNIFTSKDSSAAWNTTLLDSFCNDLHQQLNDLQGCLMQQVGVQEFPLTQEDALLAVRKYFHRITVYLREKKHSPCAWEVVRAEVWRALSSSANVLGRLREEKGGGGSGGGGSGGGGSEVQLVESGGGLVQPGNSLRLSCAASGFTFSKFGMSWVRQAPGKGLEWVSSISGSGRDTLYAESVKGRFTISRDNAKTTLYLQMNSLRPEDTAVYYCTIGGSLSVSSQGTLVTVSSHHHHHHEPEA

SEQ ID NO: 178 - protein, 579 aa, Artificial Sequence
  source: /note="Description of Artificial Sequence: Synthetic polypeptide"
MDMRVPAQLLGLLLLWLRGARCAPTSSSTKKTQLQLEHLLLDLQMILNGINNYKNPKLTRMLTFKFYMPKKATELKHLQCLEEELKPLEEVLNLAQSKNFHLRPRDLISNINVIVLELKGSETTFMCEYADETATIVEFLNRWITFCQSIISTLTSGGPGPAGLYAQPGSEVQLVESGGGLVQPGNSLRLSCAASGFTFSKFGMSWVRQAPGKGLEWVSSISGSGRDTLYAESVKGRFTISRDNAKTTLYLQMNSLRPEDTAVYYCTIGGSLSVSSQGTLVTVSSGGGGSGGGGSGGGGSGGGGSGGGGSGGGGSSGGPGPAGLYAQPGSEVQLVESGGGLVQPGGSLRLSCAASGFTFSSYTLAWVRQAPGKGLEWVAAIDSSSYTYSPDTVRGRFTISRDNAKNSLYLQMNSLRAEDTAVYYCARDSNWDALDYWGQGTTVTVSSGGGGSGGGGSGGGGSDIQMTQSPSSLSASVGDRVTITCKASQNVGTNVGWYQQKPGKAPKALIYSASFRYSGVPSRFSGSGSGTDFTLTISSLQPEDFATYYCQQYYTYPYTFGGGTKVEIKHHHHHHEPEA

SEQ ID NO: 179 - protein, 579 aa, Artificial Sequence
  source: /note="Description of Artificial Sequence: Synthetic polypeptide"
MDMRVPAQLLGLLLLWLRGARCAPTSSSTKKTQLQLEHLLLDLQMILNGINNYKNPKLTRMLTFKFYMPKKATELKHLQCLEEELKPLEEVLNLAQSKNFHLRPRDLISNINVIVLELKGSETTFMCEYADETATIVEFLNRWITFCQSIISTLTSGGPPGGPAGIGPGSEVQLVESGGGLVQPGNSLRLSCAASGFTFSKFGMSWVRQAPGKGLEWVSSISGSGRDTLYAESVKGRFTISRDNAKTTLYLQMNSLRPEDTAVYYCTIGGSLSVSSQGTLVTVSSGGGGSGGGGSGGGGSGGGGSGGGGSGGGGSSGGPPGGPAGIGPGSEVQLVESGGGLVQPGGSLRLSCAASGFTFSSYTLAWVRQAPGKGLEWVAAIDSSSYTYSPDTVRGRFTISRDNAKNSLYLQMNSLRAEDTAVYYCARDSNWDALDYWGQGTTVTVSSGGGGSGGGGSGGGGSDIQMTQSPSSLSASVGDRVTITCKASQNVGTNVGWYQQKPGKAPKALIYSASFRYSGVPSRFSGSGSGTDFTLTISSLQPEDFATYYCQQYYTYPYTFGGGTKVEIKHHHHHHEPEA

SEQ ID NO: 180 - protein, 579 aa, Artificial Sequence
  source: /note="Description of Artificial Sequence: Synthetic polypeptide"
MDMRVPAQLLGLLLLWLRGARCAPTSSSTKKTQLQLEHLLLDLQMILNGINNYKNPKLTRMLTFKFYMPKKATELKHLQCLEEELKPLEEVLNLAQSKNFHLRPRDLISNINVIVLELKGSETTFMCEYADETATIVEFLNRWITFCQSIISTLTSGGPALFKSSFPPGSEVQLVESGGGLVQPGNSLRLSCAASGFTFSKFGMSWVRQAPGKGLEWVSSISGSGRDTLYAESVKGRFTISRDNAKTTLYLQMNSLRPEDTAVYYCTIGGSLSVSSQGTLVTVSSGGGGSGGGGSGGGGSGGGGSGGGGSGGGGSSGGPALFKSSFPPGSEVQLVESGGGLVQPGGSLRLSCAASGFTFSSYTLAWVRQAPGKGLEWVAAIDSSSYTYSPDTVRGRFTISRDNAKNSLYLQMNSLRAEDTAVYYCARDSNWDALDYWGQGTTVTVSSGGGGSGGGGSGGGGSDIQMTQSPSSLSASVGDRVTITCKASQNVGTNVGWYQQKPGKAPKALIYSASFRYSGVPSRFSGSGSGTDFTLTISSLQPEDFATYYCQQYYTYPYTFGGGTKVEIKHHHHHHEPEA

SEQ ID NO: 181 - protein, 581 aa, Artificial Sequence
  source: /note="Description of Artificial Sequence: Synthetic polypeptide"
MDMRVPAQLLGLLLLWLRGARCAPTSSSTKKTQLQLEHLLLDLQMILNGINNYKNPKLTRMLTFKFYMPKKATELKHLQCLEEELKPLEEVLNLAQSKNFHLRPRDLISNINVIVLELKGSETTFMCEYADETATIVEFLNRWITFCQSIISTLTSGGPPLAQKLKSSPGSEVQLVESGGGLVQPGNSLRLSCAASGFTFSKFGMSWVRQAPGKGLEWVSSISGSGRDTLYAESVKGRFTISRDNAKTTLYLQMNSLRPEDTAVYYCTIGGSLSVSSQGTLVTVSSGGGGSGGGGSGGGGSGGGGSGGGGSGGGGSSGGPPLAQKLKSSPGSEVQLVESGGGLVQPGGSLRLSCAASGFTFSSYTLAWVRQAPGKGLEWVAAIDSSSYTYSPDTVRGRFTISRDNAKNSLYLQMNSLRAEDTAVYYCARDSNWDALDYWGQGTTVTVSSGGGGSGGGGSGGGGSDIQMTQSPSSLSASVGDRVTITCKASQNVGTNVGWYQQKPGKAPKALIYSASFRYSGVPSRFSGSGSGTDFTLTISSLQPEDFATYYCQQYYTYPYTFGGGTKVEIKHHHHHHEPEA

SEQ ID NO: 182 - protein, 613 aa, Artificial Sequence
  source: /note="Description of Artificial Sequence: Synthetic polypeptide"
MDMRVPAQLLGLLLLWLRGARCAPTSSSTKKTQLQLEHLLLDLQMILNGINNYKNPKLTRMLTFKFYMPKKATELKHLQCLEEELKPLEEVLNLAQSKNFHLRPRDLISNINVIVLELKGSETTFMCEYADETATIVEFLNRWITFCQSIISTLTSGGPPGGPAGIGALFKSSFPPLAQKLKSSPGSEVQLVESGGGLVQPGNSLRLSCAASGFTFSKFGMSWVRQAPGKGLEWVSSISGSGRDTLYAESVKGRFTISRDNAKTTLYLQMNSLRPEDTAVYYCTIGGSLSVSSQGTLVTVSSGGGGSGGGGSGGGGSGGGGSGGGGSGGGGSSGGPPGGPAGIGALFKSSFPPLAQKLKSSPGSEVQLVESGGGLVQPGGSLRLSCAASGFTFSSYTLAWVRQAPGKGLEWVAAIDSSSYTYSPDTVRGRFTISRDNAKNSLYLQMNSLRAEDTAVYYCARDSNWDALDYWGQGTTVTVSSGGGGSGGGGSGGGGSDIQMTQSPSSLSASVGDRVTITCKASQNVGTNVGWYQQKPGKAPKALIYSASFRYSGVPSRFSGSGSGTDFTLTISSLQPEDFATYYCQQYYTYPYTFGGGTKVEIKHHHHHHEPEA

SEQ ID NO: 183-190 - skipped (8 entries)

SEQ ID NO: 191 - protein, 267 aa, Artificial Sequence
  source: /note="Description of Artificial Sequence: Synthetic polypeptide"
MDMRVPAQLLGLLLLWLRGARCEVQLVESGGGLVQPGGSLRLSCAASGFTFSSYTLAWVRQAPGKGLEWVAAIDSSSYTYSPDTVRGRFTISRDNAKNSLYLQMNSLRAEDTAVYYCARDSNWDALDYWGQGTTVTVSSGGGGSGGGGSGGGGSDIQMTQSPSSLSASVGDRVTITCKASQNVGTNVGWYQQKPGKAPKALIYSASFRYSGVPSRFSGSGSGTDFTLTISSLQPEDFATYYCQQYYTYPYTFGGGTKVEIKHHHHHH

SEQ ID NO: 192 - protein, 269 aa, Artificial Sequence
  source: /note="Description of Artificial Sequence: Synthetic polypeptide"
MDMRVPAQLLGLLLLWLRGARCQSVLTQPPSVSGAPGQRVTISCSGSRSNIGSNTVKWYQQLPGTAPKLLIYYNDQRPSGVPDRFSGSKSGTSASLAITGLQAEDEADYYCQSYDRYTHPALLFGTGTKVTVLGGGGSGGGGSGGGGSQVQLVESGGGVVQPGRSLRLSCAASGFTFSSYGMHWVRQAPGKGLEWVAFIRYDGSNKYYADSVKGRFTISRDNSKNTLYLQMNSLRAEDTAVYYCKTHGSHDNWGQGTMVTVSSHHHHHH

SEQ ID NO: 193 - protein, 171 aa, Artificial Sequence
  source: /note="Description of Artificial Sequence: Synthetic polypeptide"
CDLPQTHSLGSRRTLMLLAQMRRISLFSCLKDRHDFGFPQEEFGNQFQKAETIPVLHEMIQQIFNLFSTKDSSAAWDETLLDKFYTELYQQLNDLEACVIQGVGVTETPLMKEDSILAVRKYFQRITLYLKEKKYSPCAWEVVRAEIMRSFSLSTNLQESLRSKEHHHHHH

SEQ ID NO: 194 - protein, 520 aa, Artificial Sequence; identical to SEQ ID NO: 66
  source: /note="Description of Artificial Sequence: Synthetic polypeptide"

SEQ ID NO: 195 - protein, 141 aa, Artificial Sequence
  source: /note="Description of Artificial Sequence: Synthetic polypeptide"
QVQLQESGGGLVQAGGSLRLSCAASGRTFSSVYDMGWFRQAPGKDREFVARITESARNTRYADSVRGRFTISRDNAKNTVYLQMNNLELEDAAVYYCAADPQTVVVGTPDYWGQGTQVTVSSAAAYPYDVPDYGSHHHHHH

SEQ ID NO: 196 - protein, 247 aa, Artificial Sequence
  source: /note="Description of Artificial Sequence: Synthetic polypeptide"
QSVLTQPPSVSGAPGQRVTISCTGSSSNIGSNTVKWYQQLPGTAPKLLIYGNDQRPSGVPDRFSGSKSGTSASLAITGLQAEDEADYYCQSYDRYTHPAYVFGTGTKVTVLGGGGSGGGGSGGGGSQVQLVESGGGVVQPGRSLRLSCAASGFTFSSYGMHWVRQAPGKGLEWVAFIRYDGSNKYYADSVKGRFTISRDNSKNTLYLQMNSLRAEDTAVYYCKTHGSHDNWGQGTMVTVSSHHHHHH

SEQ ID NO: 197 - protein, 247 aa, Artificial Sequence
  source: /note="Description of Artificial Sequence: Synthetic polypeptide"
QSVLTQPPSVSGAPGQRVTISCTGSSSNIGSNTVKWYQQLPGTAPKLLIYYNDQRPSGVPDRFSGSKSGTSASLAITGLQAEDEADYYCQSYDRYTHPAYVFGTGTKVTVLGGGGSGGGGSGGGGSQVQLVESGGGVVQPGRSLRLSCAASGFTFSSYGMHWVRQAPGKGLEWVAFIRYDGSNKYYADSVKGRFTISRDNSKNTLYLQMNSLRAEDTAVYYCKTHGSHDNWGQGTMVTVSSHHHHHH

SEQ ID NO: 198 - protein, 247 aa, Artificial Sequence
  source: /note="Description of Artificial Sequence: Synthetic polypeptide"
QSVLTQPPSVSGAPGQRVTISCSGSRSNIGSNTVKWYQQLPGTAPKLLIYYNDQRPSGVPDRFSGSKSGTSASLAITGLQAEDEADYYCQSYDRYTHPALLFGTGTKVTVLGGGGSGGGGSGGGGSQVQLVESGGGVVQPGRSLRLSCAASGFTFSSYAMHWVRQAPGKGLEWVAVISYDGSNKYYADSVKGRFTISRDNSKNTLYLQMNSLRAEDTAVYYCARHGSHDNWGQGTMVTVSSHHHHHH

SEQ ID NO: 199 - protein, 247 aa, Artificial Sequence
  source: /note="Description of Artificial Sequence: Synthetic polypeptide"
QSVLTQPPSVSGAPGQRVTISCSGSRSNIGSNTVKWYQQLPGTAPKLLIYYNDQRPSGVPDRFSGSKSGTSASLAITGLQAEDEADYYCQSYDRYTHPALLFGTGTKVTVLGGGGSGGGGSGGGGSQVQLVESGGGVVQPGRSLRLSCAASGFTFSSYGMHWVRQAPGKGLEWVAFIRYEGSNKYYADSVKGRFTISRDNSKNTLYLQMNSLRAEDTAVYYCKTHGSHDNWGQGTMVTVSSHHHHHH

SEQ ID NO: 200 - protein, 247 aa, Artificial Sequence
  source: /note="Description of Artificial Sequence: Synthetic polypeptide"
QSVLTQPPSVSGAPGQRVTISCSGSRSNIGSNTVKWYQQLPGTAPKLLIYYNDQRPSGVPDRFSGSKSGTSASLAITGLQAEDEADYYCQSYDRYTHPALLFGTGTKVTVLGGGGSGGGGSGGGGSQVQLVESGGGVVQPGRSLRLSCAASGFTFSSYGMHWVRQAPGKGLEWVAFIRYDGSNKYYAESVKGRFTISRDNSKNTLYLQMNSLRAEDTAVYYCKTHGSHDNWGQGTMVTVSSHHHHHH

SEQ ID NO: 201 - protein, 247 aa, Artificial Sequence
  source: /note="Description of Artificial Sequence: Synthetic polypeptide"
QSVLTQPPSVSGAPGQRVTISCSGSRSNIGSQTVKWYQQLPGTAPKLLIYYNDQRPSGVPDRFSGSKSGTSASLAITGLQAEDEADYYCQSYERYTHPALLFGTGTKVTVLGGGGSGGGGSGGGGSQVQLVESGGGVVQPGRSLRLSCAASGFTFSSYGMHWVRQAPGKGLEWVAFIRYDGSNKYYADSVKGRFTISRDNSKNTLYLQMNSLRAEDTAVYYCKTHGSHDNWGQGTMVTVSSHHHHHH

SEQ ID NO: 202 - protein, 247 aa, Artificial Sequence
  source: /note="Description of Artificial Sequence: Synthetic polypeptide"
QSVLTQPPSVSGAPGQRVTISCSGSRSNIGSQTVKWYQQLPGTAPKLLIYYNDQRPSGVPDRFSGSKSGTSASLAITGLQAEDEADYYCQSYSRYTHPALLFGTGTKVTVLGGGGSGGGGSGGGGSQVQLVESGGGVVQPGRSLRLSCAASGFTFSSYGMHWVRQAPGKGLEWVAFIRYDGSNKYYADSVKGRFTISRDNSKNTLYLQMNSLRAEDTAVYYCKTHGSHDNWGQGTMVTVSSHHHHHH

SEQ ID NO: 203 - protein, 247 aa, Artificial Sequence
  source: /note="Description of Artificial Sequence: Synthetic polypeptide"
QSVLTQPPSVSGAPGQRVTISCSGSESNIGSNTVKWYQQLPGTAPKLLIYYNDQRPSGVPDRFSGSKSGTSASLAITGLQAEDEADYYCQSYDRYTHPALLFGTGTKVTVLGGGGSGGGGSGGGGSQVQLVESGGGVVQPGRSLRLSCAASGFTFSSYGMHWVRQAPGKGLEWVAFIRYDGSNKYYADSVKGRFTISRDNSKNTLYLQMNSLRAEDTAVYYCKTHGSHDNWGQGTMVTVSSHHHHHH

SEQ ID NO: 204 - protein, 247 aa, Artificial Sequence
  source: /note="Description of Artificial Sequence: Synthetic polypeptide"
QSVLTQPPSVSGAPGQRVTISCSGSSSNIGSNTVKWYQQLPGTAPKLLIYYNDQRPSGVPDRFSGSKSGTSASLAITGLQAEDEADYYCQSYDRYTHPALLFGTGTKVTVLGGGGSGGGGSGGGGSQVQLVESGGGVVQPGRSLRLSCAASGFTFSSYGMHWVRQAPGKGLEWVAFIRYDGSNKYYADSVKGRFTISRDNSKNTLYLQMNSLRAEDTAVYYCKTHGSHDNWGQGTMVTVSSHHHHHH

SEQ ID NO: 205 - protein, 247 aa, Artificial Sequence
  source: /note="Description of Artificial Sequence: Synthetic polypeptide"
QSVLTQPPSVSGAPGQRVTISCSGSRSNIGDNTVKWYQQLPGTAPKLLIYYNDQRPSGVPDRFSGSKSGTSASLAITGLQAEDEADYYCQSYDRYTHPALLFGTGTKVTVLGGGGSGGGGSGGGGSQVQLVESGGGVVQPGRSLRLSCAASGFTFSSYGMHWVRQAPGKGLEWVAFIRYDGSNKYYADSVKGRFTISRDNSKNTLYLQMNSLRAEDTAVYYCKTHGSHDNWGQGTMVTVSSHHHHHH

SEQ ID NO: 206 - protein, 247 aa, Artificial Sequence
  source: /note="Description of Artificial Sequence: Synthetic polypeptide"
QSVLTQPPSVSGAPGQRVTISCSGSRSNIGENTVKWYQQLPGTAPKLLIYYNDQRPSGVPDRFSGSKSGTSASLAITGLQAEDEADYYCQSYDRYTHPALLFGTGTKVTVLGGGGSGGGGSGGGGSQVQLVESGGGVVQPGRSLRLSCAASGFTFSSYGMHWVRQAPGKGLEWVAFIRYDGSNKYYADSVKGRFTISRDNSKNTLYLQMNSLRAEDTAVYYCKTHGSHDNWGQGTMVTVSSHHHHHH

SEQ ID NO: 207 - protein, 247 aa, Artificial Sequence
  source: /note="Description of Artificial Sequence: Synthetic polypeptide"
QSVLTQPPSVSGAPGQRVTISCSGSRSNIGSDTVKWYQQLPGTAPKLLIYYNDQRPSGVPDRFSGSKSGTSASLAITGLQAEDEADYYCQSYDRYTHPALLFGTGTKVTVLGGGGSGGGGSGGGGSQVQLVESGGGVVQPGRSLRLSCAASGFTFSSYGMHWVRQAPGKGLEWVAFIRYDGSNKYYADSVKGRFTISRDNSKNTLYLQMNSLRAEDTAVYYCKTHGSHDNWGQGTMVTVSSHHHHHH

SEQ ID NO: 208 - protein, 247 aa, Artificial Sequence
  source: /note="Description of Artificial Sequence: Synthetic polypeptide"
QSVLTQPPSVSGAPGQRVTISCSGSRSNIGSETVKWYQQLPGTAPKLLIYYNDQRPSGVPDRFSGSKSGTSASLAITGLQAEDEADYYCQSYDRYTHPALLFGTGTKVTVLGGGGSGGGGSGGGGSQVQLVESGGGVVQPGRSLRLSCAASGFTFSSYGMHWVRQAPGKGLEWVAFIRYDGSNKYYADSVKGRFTISRDNSKNTLYLQMNSLRAEDTAVYYCKTHGSHDNWGQGTMVTVSSHHHHHH

SEQ ID NO: 209 - protein, 247 aa, Artificial Sequence
  source: /note="Description of Artificial Sequence: Synthetic polypeptide"
QSVLTQPPSVSGAPGQRVTISCSGSRSNIGSNDVKWYQQLPGTAPKLLIYYNDQRPSGVPDRFSGSKSGTSASLAITGLQAEDEADYYCQSYDRYTHPALLFGTGTKVTVLGGGGSGGGGSGGGGSQVQLVESGGGVVQPGRSLRLSCAASGFTFSSYGMHWVRQAPGKGLEWVAFIRYDGSNKYYADSVKGRFTISRDNSKNTLYLQMNSLRAEDTAVYYCKTHGSHDNWGQGTMVTVSSHHHHHH

SEQ ID NO: 210 - protein, 247 aa, Artificial Sequence
  source: /note="Description of Artificial Sequence: Synthetic polypeptide"
QSVLTQPPSVSGAPGQRVTISCSGSRSNIGSNTVDWYQQLPGTAPKLLIYYNDQRPSGVPDRFSGSKSGTSASLAITGLQAEDEADYYCQSYDRYTHPALLFGTGTKVTVLGGGGSGGGGSGGGGSQVQLVESGGGVVQPGRSLRLSCAASGFTFSSYGMHWVRQAPGKGLEWVAFIRYDGSNKYYADSVKGRFTISRDNSKNTLYLQMNSLRAEDTAVYYCKTHGSHDNWGQGTMVTVSSHHHHHH

SEQ ID NO: 211 - protein, 247 aa, Artificial Sequence
  source: /note="Description of Artificial Sequence: Synthetic polypeptide"
QSVLTQPPSVSGAPGQRVTISCSGSRSNIGSNTVEWYQQLPGTAPKLLIYYNDQRPSGVPDRFSGSKSGTSASLAITGLQAEDEADYYCQSYDRYTHPALLFGTGTKVTVLGGGGSGGGGSGGGGSQVQLVESGGGVVQPGRSLRLSCAASGFTFSSYGMHWVRQAPGKGLEWVAFIRYDGSNKYYADSVKGRFTISRDNSKNTLYLQMNSLRAEDTAVYYCKTHGSHDNWGQGTMVTVSSHHHHHH

SEQ ID NO: 212 - protein, 247 aa, Artificial Sequence
  source: /note="Description of Artificial Sequence: Synthetic polypeptide"
QSVLTQPPSVSGAPGQRVTISCSGSRSNIGSNTVKWYQQLPGTAPKLLIYYNDQDPSGVPDRFSGSKSGTSASLAITGLQAEDEADYYCQSYDRYTHPALLFGTGTKVTVLGGGGSGGGGSGGGGSQVQLVESGGGVVQPGRSLRLSCAASGFTFSSYGMHWVRQAPGKGLEWVAFIRYDGSNKYYADSVKGRFTISRDNSKNTLYLQMNSLRAEDTAVYYCKTHGSHDNWGQGTMVTVSSHHHHHH

SEQ ID NO: 213 - protein, 247 aa, Artificial Sequence
  source: /note="Description of Artificial Sequence: Synthetic polypeptide"
QSVLTQPPSVSGAPGQRVTISCSGSRSNIGSNTVKWYQQLPGTAPKLLIYYNDQEPSGVPDRFSGSKSGTSASLAITGLQAEDEADYYCQSYDRYTHPALLFGTGTKVTVLGGGGSGGGGSGGGGSQVQLVESGGGVVQPGRSLRLSCAASGFTFSSYGMHWVRQAPGKGLEWVAFIRYDGSNKYYADSVKGRFTISRDNSKNTLYLQMNSLRAEDTAVYYCKTHGSHDNWGQGTMVTVSSHHHHHH

SEQ ID NO: 214 - protein, 247 aa, Artificial Sequence
  source: /note="Description of Artificial Sequence: Synthetic polypeptide"
QSVLTQPPSVSGAPGQRVTISCSGSRSNIGSNTVKWYQQLPGTAPKLLIYYNDQRPDGVPDRFSGSKSGTSASLAITGLQAEDEADYYCQSYDRYTHPALLFGTGTKVTVLGGGGSGGGGSGGGGSQVQLVESGGGVVQPGRSLRLSCAASGFTFSSYGMHWVRQAPGKGLEWVAFIRYDGSNKYYADSVKGRFTISRDNSKNTLYLQMNSLRAEDTAVYYCKTHGSHDNWGQGTMVTVSSHHHHHH

SEQ ID NO: 215 - protein, 247 aa, Artificial Sequence
  source: /note="Description of Artificial Sequence: Synthetic polypeptide"
QSVLTQPPSVSGAPGQRVTISCSGSRSNIGSNTVKWYQQLPGTAPKLLIYYNDQRPSGVPDRFSGSKSGTSASLAITGLQAEDEADYYCQSYDEYTHPALLFGTGTKVTVLGGGGSGGGGSGGGGSQVQLVESGGGVVQPGRSLRLSCAASGFTFSSYGMHWVRQAPGKGLEWVAFIRYDGSNKYYADSVKGRFTISRDNSKNTLYLQMNSLRAEDTAVYYCKTHGSHDNWGQGTMVTVSSHHHHHH

SEQ ID NO: 216 - protein, 247 aa, Artificial Sequence
  source: /note="Description of Artificial Sequence: Synthetic polypeptide"
QSVLTQPPSVSGAPGQRVTISCSGSRSNIGSNTVKWYQQLPGTAPKLLIYYNDQRPSGVPDRFSGSKSGTSASLAITGLQAEDEADYYCQSYDRYTDPALLFGTGTKVTVLGGGGSGGGGSGGGGSQVQLVESGGGVVQPGRSLRLSCAASGFTFSSYGMHWVRQAPGKGLEWVAFIRYDGSNKYYADSVKGRFTISRDNSKNTLYLQMNSLRAEDTAVYYCKTHGSHDNWGQGTMVTVSSHHHHHH

SEQ ID NO: 217 - protein, 247 aa, Artificial Sequence
  source: /note="Description of Artificial Sequence: Synthetic polypeptide"
QSVLTQPPSVSGAPGQRVTISCSGSESNIGSNTVKWYQQLPGTAPKLLIYYNDQEPSGVPDRFSGSKSGTSASLAITGLQAEDEADYYCQSYDEYTHPALLFGTGTKVTVLGGGGSGGGGSGGGGSQVQLVESGGGVVQPGRSLRLSCAASGFTFSSYGMHWVRQAPGKGLEWVAFIRYDGSNKYYADSVKGRFTISRDNSKNTLYLQMNSLRAEDTAVYYCKTHGSHDNWGQGTMVTVSSHHHHHH

SEQ ID NO: 218 - protein, 247 aa, Artificial Sequence
  source: /note="Description of Artificial Sequence: Synthetic polypeptide"
QSVLTQPPSVSGAPGQRVTISCSGSESNIGSNDVKWYQQLPGTAPKLLIYYNDQRPSGVPDRFSGSKSGTSASLAITGLQAEDEADYYCQSYDRYTHPALLFGTGTKVTVLGGGGSGGGGSGGGGSQVQLVESGGGVVQPGRSLRLSCAASGFTFSSYGMHWVRQAPGKGLEWVAFIRYDGSNKYYADSVKGRFTISRDNSKNTLYLQMNSLRAEDTAVYYCKTHGSHDNWGQGTMVTVSSHHHHHH

SEQ ID NO: 219 - protein, 247 aa, Artificial Sequence
  source: /note="Description of Artificial Sequence: Synthetic polypeptide"
QSVLTQPPSVSGAPGQRVTISCSGSRSNIGSNTVKWYQQLPGTAPKLLIYYNDQRPSGVPDRFSGSKSGTSASLAITGLQAEDEADYYCQSYDRYTHPALLFGTGTKVTVLGGGGSGGGGSGGGGSQVQLVESGGGVVQPGRSLRLSCAASGFTFESYGMHWVRQAPGKGLEWVAFIRYDGSNKYYADSVKGRFTISRDNSKNTLYLQMNSLRAEDTAVYYCKTHGSHDNWGQGTMVTVSSHHHHHH

SEQ ID NO: 220 - protein, 247 aa, Artificial Sequence
  source: /note="Description of Artificial Sequence: Synthetic polypeptide"
QSVLTQPPSVSGAPGQRVTISCSGSRSNIGSNTVKWYQQLPGTAPKLLIYYNDQRPSGVPDRFSGSKSGTSASLAITGLQAEDEADYYCQSYDRYTHPALLFGTGTKVTVLGGGGSGGGGSGGGGSQVQLVESGGGVVQPGRSLRLSCAASGFTFSEYGMHWVRQAPGKGLEWVAFIRYDGSNKYYADSVKGRFTISRDNSKNTLYLQMNSLRAEDTAVYYCKTHGSHDNWGQGTMVTVSSHHHHHH

SEQ ID NO: 221 - protein, 247 aa, Artificial Sequence
  source: /note="Description of Artificial Sequence: Synthetic polypeptide"
QSVLTQPPSVSGAPGQRVTISCSGSRSNIGSNTVKWYQQLPGTAPKLLIYYNDQRPSGVPDRFSGSKSGTSASLAITGLQAEDEADYYCQSYDRYTHPALLFGTGTKVTVLGGGGSGGGGSGGGGSQVQLVESGGGVVQPGRSLRLSCAASGFTFSDYGMHWVRQAPGKGLEWVAFIRYDGSNKYYADSVKGRFTISRDNSKNTLYLQMNSLRAEDTAVYYCKTHGSHDNWGQGTMVTVSSHHHHHH

SEQ ID NO: 222 - protein, 247 aa, Artificial Sequence
  source: /note="Description of Artificial Sequence: Synthetic polypeptide"
QSVLTQPPSVSGAPGQRVTISCSGSRSNIGSNTVKWYQQLPGTAPKLLIYYNDQRPSGVPDRFSGSKSGTSASLAITGLQAEDEADYYCQSYDRYTHPALLFGTGTKVTVLGGGGSGGGGSGGGGSQVQLVESGGGVVQPGRSLRLSCAASGFTFSSYGMHWVRQAPGKGLEWVAFIEYDGSNKYYADSVKGRFTISRDNSKNTLYLQMNSLRAEDTAVYYCKTHGSHDNWGQGTMVTVSSHHHHHH

SEQ ID NO: 223 - protein, 247 aa, Artificial Sequence
  source: /note="Description of Artificial Sequence: Synthetic polypeptide"
QSVLTQPPSVSGAPGQRVTISCSGSRSNIGSNTVKWYQQLPGTAPKLLIYYNDQRPSGVPDRFSGSKSGTSASLAITGLQAEDEADYYCQSYDRYTHPALLFGTGTKVTVLGGGGSGGGGSGGGGSQVQLVESGGGVVQPGRSLRLSCAASGFTFSSYGMHWVRQAPGKGLEWVAFIDYDGSNKYYADSVKGRFTISRDNSKNTLYLQMNSLRAEDTAVYYCKTHGSHDNWGQGTMVTVSSHHHHHH

SEQ ID NO: 224 - protein, 247 aa, Artificial Sequence
  source: /note="Description of Artificial Sequence: Synthetic polypeptide"
QSVLTQPPSVSGAPGQRVTISCSGSRSNIGSNTVKWYQQLPGTAPKLLIYYNDQRPSGVPDRFSGSKSGTSASLAITGLQAEDEADYYCQSYDRYTHPALLFGTGTKVTVLGGGGSGGGGSGGGGSQVQLVESGGGVVQPGRSLRLSCAASGFTFSSYGMHWVRQAPGKGLEWVAFIRYDGSNDYYADSVKGRFTISRDNSKNTLYLQMNSLRAEDTAVYYCKTHGSHDNWGQGTMVTVSSHHHHHH

SEQ ID NO: 225 - protein, 247 aa, Artificial Sequence
  source: /note="Description of Artificial Sequence: Synthetic polypeptide"
QSVLTQPPSVSGAPGQRVTISCSGSRSNIGSNTVKWYQQLPGTAPKLLIYYNDQRPSGVPDRFSGSKSGTSASLAITGLQAEDEADYYCQSYDRYTHPALLFGTGTKVTVLGGGGSGGGGSGGGGSQVQLVESGGGVVQPGRSLRLSCAASGFTFSSYGMHWVRQAPGKGLEWVAFIRYDGSNEYYADSVKGRFTISRDNSKNTLYLQMNSLRAEDTAVYYCKTHGSHDNWGQGTMVTVSSHHHHHH

SEQ ID NO: 226 - protein, 247 aa, Artificial Sequence
  source: /note="Description of Artificial Sequence: Synthetic polypeptide"
QSVLTQPPSVSGAPGQRVTISCSGSRSNIGSNTVKWYQQLPGTAPKLLIYYNDQRPSGVPDRFSGSKSGTSASLAITGLQAEDEADYYCQSYDRYTHPALLFGTGTKVTVLGGGGSGGGGSGGGGSQVQLVESGGGVVQPGRSLRLSCAASGFTFSSYGMHWVRQAPGKGLEWVAFIRYDGSNKYYADSVEGRFTISRDNSKNTLYLQMNSLRAEDTAVYYCKTHGSHDNWGQGTMVTVSSHHHHHH

SEQ ID NO: 227 - protein, 247 aa, Artificial Sequence
  source: /note="Description of Artificial Sequence: Synthetic polypeptide"
QSVLTQPPSVSGAPGQRVTISCSGSRSNIGSNTVKWYQQLPGTAPKLLIYYNDQRPSGVPDRFSGSKSGTSASLAITGLQAEDEADYYCQSYDRYTHPALLFGTGTKVTVLGGGGSGGGGSGGGGSQVQLVESGGGVVQPGRSLRLSCAASGFTFSSYGMHWVRQAPGKGLEWVAFIRYDGSNKYYADSVKGRFTISRDNSKNTLYLQMNSLRAEDTAVYYCKTHGSEDNWGQGTMVTVSSHHHHHH

SEQ ID NO: 228 - protein, 247 aa, Artificial Sequence
  source: /note="Description of Artificial Sequence: Synthetic polypeptide"
QSVLTQPPSVSGAPGQRVTISCSGSRSNIGSNTVKWYQQLPGTAPKLLIYYNDQRPSGVPDRFSGSKSGTSASLAITGLQAEDEADYYCQSYDRYTHPALLFGTGTKVTVLGGGGSGGGGSGGGGSQVQLVESGGGVVQPGRSLRLSCAASGFTFSSYGMHWVRQAPGKGLEWVAFIEYDGSNKYYADSVEGRFTISRDNSKNTLYLQMNSLRAEDTAVYYCKTHGSHDNWGQGTMVTVSSHHHHHH

SEQ ID NO: 229 - protein, 247 aa, Artificial Sequence
  source: /note="Description of Artificial Sequence: Synthetic polypeptide"
QSVLTQPPSVSGAPGQRVTISCSGSRSNIGSNTVKWYQQLPGTAPKLLIYYNDQRPSGVPDRFSGSKSGTSASLAITGLQAEDEADYYCQSYDRYTHPALLFGTGTKVTVLGGGGSGGGGSGGGGSQVQLVESGGGVVQPGRSLRLSCAASGFTFSSYGMHWVRQAPGKGLEWVAFIEYDGSNKYYADSVEGRFTISRDNSKNTLYLQMNSLRAEDTAVYYCKTHGSEDNWGQGTMVTVSSHHHHHH

SEQ ID NO: 230 - protein, 247 aa, Artificial Sequence
  source: /note="Description of Artificial Sequence: Synthetic polypeptide"
QSVLTQPPSVSGAPGQRVTISCSGSRSNIGSNTVKWYQQLPGTAPKLLIYYNDQRPSGVPDRFSGSKSGTSASLAITGLQAEDEADYYCQSYDRYTHPALLFGTGTKVTVLGGGGSGGGGSGGGGSQVQLVESGGGVVQPGRSLRLSCAASGFTFSSYGMHWVRQAPGKGLEWVAFIRYDGSNKYYADSVKGRFTISRDNSKNTLYLQMNSLRAEDTAVYYCKTHGSHDNWGQGTMVTVSSHHHHHH

SEQ ID NO: 231 - protein, 306 aa, Artificial Sequence
  source: /note="Description of Artificial Sequence: Synthetic polypeptide"
IWELKKDVYVVELDWYPDAPGEMVVLTCDTPEEDGITWTLDQSSEVLGSGKTLTIQVKEFGDAGQYTCHKGGEVLSHSLLLLHKKEDGIWSTDILKDQKEPKNKTFLRCEAKNYSGRFTCWWLTTISTDLTFSVKSSRGSSDPQGVTCGAATLSAERVRGDNKEYEYSVECQEDSACPAAEESLPIEVMVDAVHKLKYENYTSSFFIRDIIKPDPPKNLQLKPLKNSRQVEVSWEYPDTWSTPHSYFSLTFCVQVQGKSKREKKDRVFTDKTSATVICRKNASISVRAQDRYYSSSWSEWASVPCS

SEQ ID NO: 232 - protein, 137 aa, Artificial Sequence
  source: /note="Description of Artificial Sequence: Synthetic polypeptide"
QVQLQESGGGLVQTGGSLRLSCTTSGTIFSGYTMGWYRQAPGEQRELVAVISGGGDTNYADSVKGRFTISRDNTKDTMYLQMNSLKPEDTAVYYCYSREVTPPWKLYWGQGTQVTVSSAAAYPYDVPDYGSHHHHHH

SEQ ID NO: 233 - protein, 137 aa, Artificial Sequence
  source: /note="Description of Artificial Sequence: Synthetic polypeptide"
QVQLQESGGGLVQEGGSLRLSCAASERIFSTDVMGWYRQAAEKQRELVAVVSARGTTNYLDAVKGRFTISRDNARNTLTLQMNDLKPEDTASYYCYVRETTSPWRIYWGQGTQVTVSSAAAYPYDVPDYGSHHHHHH

SEQ ID NO: 234 - protein, 138 aa, Artificial Sequence
  source: /note="Description of Artificial Sequence: Synthetic polypeptide"
QVQLQESGGGLVQAGGSLRLSCAASGSIFSANAMGWYRQAPGKQRELVAVISSGGSTNYADSVKGRFTISRDNAKNTVYLQMNSLKPEDTAVYYCMYSGSYYYTPNDYWGQGTQVTVSSAAAYPYDVPDYGSHHHHHH

SEQ ID NO: 235 - protein, 245 aa, Artificial Sequence
  source: /note="Description of Artificial Sequence: Synthetic polypeptide"
EVQLVESGGGLVQPGGSLRLSCAASGFTFSSYTLAWVRQAPGKGLEWVAAIDSSSYTYSPDTVRGRFTISRDNAKNSLYLQMNSLRAEDTAVYYCARDSNWDALDYWGQGTTVTVSSGGGGSGGGGSGGGGSDIQMTQSPSSLSASVGDRVTITCKASQNVGTNVGWYQQKPGKAPKALIYSASFRYSGVPSRFSGSGSGTDFTLTISSLQPEDFATYYCQQYYTYPYTFGGGTKVEIKHHHHHH

SEQ ID NO: 236 - protein, 138 aa, Artificial Sequence
  source: /note="Description of Artificial Sequence: Synthetic polypeptide"
EVQLLESGGGLVQPGGSLRLSCAASGSIFSANAMGWYRQAPGKQRELVAVISSGGSTNYADSVKGRFTISRDNSKNTVYLQMNSLRAEDTAVYYCMYSGSYYYTPNDYWGQGTLVTVSSAAAYPYDVPDYGSHHHHHH

SEQ ID NO: 237 - protein, 138 aa, Artificial Sequence
  source: /note="Description of Artificial Sequence: Synthetic polypeptide"
EVQLLESGGGLVQPGGSLRLSCAASGSIFSANAMGWYRQAPGKGLELVAVISSGGSTNYADSVKGRFTISRDNSKNTVYLQMNSLRAEDTAVYYCMYSGSYYYTPNDYWGQGTLVTVSSAAAYPYDVPDYGSHHHHHH

SEQ ID NO: 238 - protein, 138 aa, Artificial Sequence
  source: /note="Description of Artificial Sequence: Synthetic polypeptide"
EVQLLESGGGLVQPGGSLRLSCAASGSIFSANAMGWVRQAPGKGLEWVSVISSGGSTNYADSVKGRFTISRDNSKNTLYLQMNSLRAEDTAVYYCMYSGSYYYTPNDYWGQGTLVTVSSAAAYPYDVPDYGSHHHHHH

SEQ ID NO: 239 - protein, 138 aa, Artificial Sequence
  source: /note="Description of Artificial Sequence: Synthetic polypeptide"
QVQLLESGGGLVQPGGSLRLSCAASGSIFSANAMGWYRQAPGKQRELVAVISSGGSTNYADSVKGRFTISRDNSKNTVYLQMNSLRAEDTAVYYCMYSGSYYYTPNDYWGQGTLVTVSSAAAYPYDVPDYGSHHHHHH

SEQ ID NO: 240 - protein, 138 aa, Artificial Sequence
  source: /note="Description of Artificial Sequence: Synthetic polypeptide"
EVQLLESGGGLVQPGGSLRLSCAASGSIFSANAMGWYRQAPGKGRELVAVISSGGSTNYADSVKGRFTISRDNSKNTVYLQMNSLRAEDTAVYYCMYSGSYYYTPNDYWGQGTLVTVSSAAAYPYDVPDYGSHHHHHH

SEQ ID NO: 241 - protein, 138 aa, Artificial Sequence
  source: /note="Description of Artificial Sequence: Synthetic polypeptide"
QVQLLESGGGLVQAGGSLRLSCAASGSIFSANAMGWYRQAPGKQRELVAVISSGGSTNYADSVKGRFTISRDNSKNTVYLQMNSLRAEDTAVYYCMYSGSYYYTPNDYWGQGTLVTVSSAAAYPYDVPDYGSHHHHHH

SEQ ID NO: 242 - protein, 137 aa, Artificial Sequence
  source: /note="Description of Artificial Sequence: Synthetic polypeptide"
EVQLLESGGGLVQPGGSLRLSCAASERIFSTDVMGWYRQAPGKQRELVAVVSARGTTNYLDAVKGRFTISRDNSKNTLYLQMNSLRAEDTAVYYCYVRETTSPWRIYWGQGTLVTVSSAAAYPYDVPDYGSHHHHHH

SEQ ID NO: 243 - protein, 137 aa, Artificial Sequence
  source: /note="Description of Artificial Sequence: Synthetic polypeptide"
EVQLLESGGGLVQPGGSLRLSCAASERIFSTDVMGWYRQAPGKGLELVAVVSARGTTNYLDAVKGRFTISRDNSKNTLYLQMNSLRAEDTAVYYCYVRETTSPWRIYWGQGTLVTVSSAAAYPYDVPDYGSHHHHHH

SEQ ID NO: 244 - protein, 137 aa, Artificial Sequence
  source: /note="Description of Artificial Sequence: Synthetic polypeptide"
EVQLLESGGGLVQPGGSLRLSCAASERIFSTDVMGWVRQAPGKGLEWVSVVSARGTTNYLDAVKGRFTISRDNSKNTLYLQMNSLRAEDTAVYYCYVRETTSPWRIYWGQGTLVTVSSAAAYPYDVPDYGSHHHHHH

SEQ ID NO: 245 - protein, 137 aa, Artificial Sequence
  source: /note="Description of Artificial Sequence: Synthetic polypeptide"
QVQLLESGGGLVQPGGSLRLSCAASERIFSTDVMGWYRQAPGKQRELVAVVSARGTTNYLDAVKGRFTISRDNSKNTLYLQMNSLRAEDTAVYYCYVRETTSPWRIYWGQGTLVTVSSAAAYPYDVPDYGSHHHHHH

SEQ ID NO: 246 - protein, 137 aa, Artificial Sequence
  source: /note="Description of Artificial Sequence: Synthetic polypeptide"
EVQLLESGGGLVQPGGSLRLSCAASERIFSTDVMGWYRQAPGKGRELVAVVSARGTTNYLDSVKGRFTISRDNSKNTLYLQMNSLRAEDTAVYYCYVRETTSPWRIYWGQGTLVTVSSAAAYPYDVPDYGSHHHHHH

SEQ ID NO: 247 - protein, 137 aa, Artificial Sequence
  source: /note="Description of Artificial Sequence: Synthetic polypeptide"
QVQLLESGGGLVQEGGSLRLSCAASERIFSTDVMGWYRQAAGKQRELVAVVSARGTTNYLDAVKGRFTISRDNSKNTLYLQMNSLRAEDTASYYCYVRETTSPWRIYWGQGTLVTVSSAAAYPYDVPDYGSHHHHHH

SEQ ID NO: 248 - protein, 137 aa, Artificial Sequence
  source: /note="Description of Artificial Sequence: Synthetic polypeptide"
EVQLLESGGGLVQPGGSLRLSCAASERIFSTDVMGWYRQAPGKGLELVAVVSARGTTNYLDSVKGRFTISRDNSKNTLYLQMNSLRAEDTAVYYCYVRETTSPWRIYWGQGTLVTVSSAAAYPYDVPDYGSHHHHHH

SEQ ID NO: 249 - protein, 137 aa, Artificial Sequence
  source: /note="Description of Artificial Sequence: Synthetic polypeptide"
EVQLLESGGGLVQPGGSLRLSCATSGTIFSGYTMGWYRQAPGKQRELVAVISGGGDTNYADSVKGRFTISRDNSKDTMYLQMNSLRAEDTAVYYCYSREVTPPWKLYWGQGTLVTVSSAAAYPYDVPDYGSHHHHHH

SEQ ID NO: 250 - protein, 137 aa, Artificial Sequence
  source: /note="Description of Artificial Sequence: Synthetic polypeptide"
EVQLLESGGGLVQPGGSLRLSCATSGTIFSGYTMGWYRQAPGKGLELVAVISGGGDTNYADSVKGRFTISRDNSKDTMYLQMNSLRAEDTAVYYCYSREVTPPWKLYWGQGTLVTVSSAAAYPYDVPDYGSHHHHHH

SEQ ID NO: 251 - protein, 137 aa, Artificial Sequence
  source: /note="Description of Artificial Sequence: Synthetic polypeptide"
EVQLLESGGGLVQPGGSLRLSCAASGTIFSGYTMGWVRQAPGKGLEWVSVISGGGDTNYADSVKGRFTISRDNSKNTLYLQMNSLRAEDTAVYYCYSREVTPPWKLYWGQGTLVTVSSAAAYPYDVPDYGSHHHHHH

SEQ ID NO: 252 - protein, 137 aa, Artificial Sequence
  source: /note="Description of Artificial Sequence: Synthetic polypeptide"
QVQLLESGGGLVQPGGSLRLSCATSGTIFSGYTMGWYRQAPGKQRELVAVISGGGDTNYADSVKGRFTISRDNSKDTMYLQMNSLRAEDTAVYYCYSREVTPPWKLYWGQGTLVTVSSAAAYPYDVPDYGSHHHHHH

SEQ ID NO: 253 - protein, 137 aa, Artificial Sequence
  source: /note="Description of Artificial Sequence: Synthetic polypeptide"
EVQLLESGGGLVQPGGSLRLSCATSGTIFSGYTMGWYRQAPGKQRELVAVISGGGDTNYADSVKGRFTISRDNSKNTMYLQMNSLRAEDTAVYYCYSREVTPPWKLYWGQGTLVTVSSAAAYPYDVPDYGSHHHHHH

SEQ ID NO: 254 - protein, 137 aa, Artificial Sequence
  source: /note="Description of Artificial Sequence: Synthetic polypeptide"
EVQLLESGGGLVQPGGSLRLSCATSGTIFSGYTMGWYRQAPGKGRELVAVISGGGDTNYADSVKGRFTISRDNSKNTMYLQMNSLRAEDTAVYYCYSREVTPPWKLYWGQGTLVTVSSAAAYPYDVPDYGSHHHHHH

SEQ ID NO: 255 - protein, 137 aa, Artificial Sequence
  source: /note="Description of Artificial Sequence: Synthetic polypeptide"
QVQLLESGGGLVQTGGSLRLSCATSGTIFSGYTMGWYRQAPGKQRELVAVISGGGDTNYADSVKGRFTISRDNSKDTMYLQMNSLRAEDTAVYYCYSREVTPPWKLYWGQGTLVTVSSAAAYPYDVPDYGSHHHHHH

SEQ ID NO: 256 - protein, 137 aa, Artificial Sequence
  source: /note="Description of Artificial Sequence: Synthetic polypeptide"
EVQLLESGGGLVQPGGSLRLSCATSGTIFSGYTMGWYRQAPGKGLELVAVISGGGDTNYADSVKGRFTISRDNSKNTMYLQMNSLRAEDTAVYYCYSREVTPPWKLYWGQGTLVTVSSAAAYPYDVPDYGSHHHHHH

SEQ ID NO: 257 - protein, 245 aa, Artificial Sequence
  source: /note="Description of Artificial Sequence: Synthetic polypeptide"
EVQLVESGGGLVQPGGSLRLSCAASGFTFSSYTLAWVRQAPGKGLEWVAAIDSSSYTYSPDTVRGRFTISRDNAKNSLYLQMNSLRAEDTAVYYCARDSNWDALDYWGQGTTVTVSSGGGGSGGGGSGGGGSDIQMTQSPSSLSASVGDRVTITCKAREKLWSAVAWYQQKPGKAPKALIYSASFRYSGVPSRFSGSGSGTDFTLTISSLQPEDFATYYCQQYYTYPYTFGGGTKVEIKHHHHHH

SEQ ID NO: 258 - protein, 245 aa, Artificial Sequence
  source: /note="Description of Artificial Sequence: Synthetic polypeptide"
EVQLVESGGGLVQPGGSLRLSCAASGFTFSSYTLAWVRQAPGKGLEWVAAIDSSSYTYSPDTVRGRFTISRDNAKNSLYLQMNSLRAEDTAVYYCARDSNWDALDYWGQGTTVTVSSGGGGSGGGGSGGGGSDIQMTQSPSSLSASVGDRVTITCKAREKLWSAVAWYQQKPGKAPKSLIYSASFRYSGVPSRFSGSGSGTDFTLTISSLQPEDFATYYCQQYYTYPYTFGGGTKVEIKHHHHHH

SEQ ID NO: 259 - protein, 245 aa, Artificial Sequence
  source: /note="Description of Artificial Sequence: Synthetic polypeptide"
EVQLVESGGGLVQPGGSLRLSCAASGFTFSSYTLAWVRQAPGKGLEWVAAIDSSSYTYSPDTVRGRFTISRDNAKNSLYLQMNSLRAEDTAVYYCARDSNWDALDYWGQGTTVTVSSGGGGSGGGGSGGGGSDIQMTQSPSSLSASVGDRVTITCKVTEKVWGNVAWYQQKPGKAPISLIYSPSLRKSGVPSRFSGSGSGTDFTLTISSLQPEDFATYYCQQYYTYPYTFGGGTKVEIKHHHHHH

SEQ ID NO: 260 - protein, 245 aa, Artificial Sequence
  source: /note="Description of Artificial Sequence: Synthetic polypeptide"
EVQLVESGGGLVQPGGSLRLSCAASGFTFSSYTLAWVRQAPGKGLEWVAAIDSSSYTYSPDTVRGRFTISRDNAKNSLYLQMNSLRAEDTAVYYCARDSNWDALDYWGQGTTVTVSSGGGGSGGGGSGGGGSDIQMTQSPSSLSASVGDRVTITCKSSEKLWANVAWYQQKPGKAPKALIYSASFRYSGVPSRFSGSGSGTDFTLTISSLQPEDFATYYCQQYYTYPYTFGGGTKVEIKHHHHHH

SEQ ID NO: 261 - protein, 245 aa, Artificial Sequence
  source: /note="Description of Artificial Sequence: Synthetic polypeptide"
EVQLVESGGGLVQPGGSLRLSCAASGFTFSSYTLAWVRQAPGKGLEWVAAIDSSSYTYSPDTVRGRFTISRDNAKNSLYLQMNSLRAEDTAVYYCARDSNWDALDYWGQGTTVTVSSGGGGSGGGGSGGGGSDIQMTQSPSSLSASVGDRVTITCKSSEKLWANVAWYQQKPGKAPKSLIYSASFRYSGVPSRFSGSGSGTDFTLTISSLQPEDFATYYCQQYYTYPYTFGGGTKVEIKHHHHHH

SEQ ID NO: 262 - protein, 214 aa, Artificial Sequence
  source: /note="Description of Artificial Sequence: Synthetic polypeptide"
DIQMTQSPSSLSASVGDRVTITCKASQNVGTNVGWYQQKPGKAPKALIYSASFRYSGVPSRFSGSGSGTDFTLTISSLQPEDFATYYCQQYYTYPYTFGGGTKVEIKRTVAAPSVFIFPPSDEQLKSGTASVVCLLNNFYPREAKVQWKVDNALQSGNSQESVTEQDSKDSTYSLSSTLTLSKADYEKHKVYACEVTHQGLSSPVTKSFNRGEC

SEQ ID NO: 263 - protein, 214 aa, Artificial Sequence
  source: /note="Description of Artificial Sequence: Synthetic polypeptide"
DIQMTQSPSSLSASVGDRVTITCKAREKLWSAVAWYQQKPGKAPKSLIYSASFRYSGVPSRFSGSGSGTDFTLTISSLQPEDFATYYCQQYYTYPYTFGGGTKVEIKRTVAAPSVFIFPPSDEQLKSGTASVVCLLNNFYPREAKVQWKVDNALQSGNSQESVTEQDSKDSTYSLSSTLTLSKADYEKHKVYACEVTHQGLSSPVTKSFNRGEC

SEQ ID NO: 264 - protein, 214 aa, Artificial Sequence
  source: /note="Description of Artificial Sequence: Synthetic polypeptide"
DIQMTQSPSSLSASVGDRVTITCKVTEKVWGNVAWYQQKPGKAPISLIYSPSLRKSGVPSRFSGSGSGTDFTLTISSLQPEDFATYYCQQYYTYPYTFGGGTKVEIKRTVAAPSVFIFPPSDEQLKSGTASVVCLLNNFYPREAKVQWKVDNALQSGNSQESVTEQDSKDSTYSLSSTLTLSKADYEKHKVYACEVTHQGLSSPVTKSFNRGEC

SEQ ID NO: 265 - protein, 363 aa, Artificial Sequence
  source: /note="Description of Artificial Sequence: Synthetic polypeptide"
DIQMTQSPSSLSASVGDRVTITCKAREKLWSAVAWYQQKPGKAPKSLIYSASFRYSGVPSRFSGSGSGTDFTLTISSLQPEDFATYYCQQYYTYPYTFGGGTKVEIKRTVAAPSVFIFPPSDEQLKSGTASVVCLLNNFYPREAKVQWKVDNALQSGNSQESVTEQDSKDSTYSLSSTLTLSKADYEKHKVYACEVTHQGLSSPVTKSFNRGECGGGGSGGGGSGGGGSGGGGSGGGGSGGGGSEVQLLESGGGLVQPGGSLRLSCAASGSIFSANAMGWYRQAPGKQRELVAVISSGGSTNYADSVKGRFTISRDNSKNTVYLQMNSLRAEDTAVYYCMYSGSYYYTPNDYWGQGTLVTVSS

SEQ ID NO: 266 - protein, 363 aa, Artificial Sequence
  source: /note="Description of Artificial Sequence: Synthetic polypeptide"
DIQMTQSPSSLSASVGDRVTITCKAREKLWSAVAWYQQKPGKAPKSLIYSASFRYSGVPSRFSGSGSGTDFTLTISSLQPEDFATYYCQQYYTYPYTFGGGTKVEIKRTVAAPSVFIFPPSDEQLKSGTASVVCLLNNFYPREAKVQWKVDNALQSGNSQESVTEQDSKDSTYSLSSTLTLSKADYEKHKVYACEVTHQGLSSPVTKSFNRGECGGGGSGGGGSGGGGSGGGGSGGGGSGGGGSEVQLLESGGGLVQPGGSLRLSCAASGSIFSANAMGWYRQAPGKGLELVAVISSGGSTNYADSVKGRFTISRDNSKNTVYLQMNSLRAEDTAVYYCMYSGSYYYTPNDYWGQGTLVTVSS

SEQ ID NO: 267 - protein, 363 aa, Artificial Sequence
  source: /note="Description of Artificial Sequence: Synthetic polypeptide"
DIQMTQSPSSLSASVGDRVTITCKVTEKVWGNVAWYQQKPGKAPISLIYSPSLRKSGVPSRFSGSGSGTDFTLTISSLQPEDFATYYCQQYYTYPYTFGGGTKVEIKRTVAAPSVFIFPPSDEQLKSGTASVVCLLNNFYPREAKVQWKVDNALQSGNSQESVTEQDSKDSTYSLSSTLTLSKADYEKHKVYACEVTHQGLSSPVTKSFNRGECGGGGSGGGGSGGGGSGGGGSGGGGSGGGGSEVQLLESGGGLVQPGGSLRLSCAASGSIFSANAMGWYRQAPGKQRELVAVISSGGSTNYADSVKGRFTISRDNSKNTVYLQMNSLRAEDTAVYYCMYSGSYYYTPNDYWGQGTLVTVSS

SEQ ID NO: 268 - protein, 363 aa, Artificial Sequence
  source: /note="Description of Artificial Sequence: Synthetic polypeptide"
DIQMTQSPSSLSASVGDRVTITCKVTEKVWGNVAWYQQKPGKAPISLIYSPSLRKSGVPSRFSGSGSGTDFTLTISSLQPEDFATYYCQQYYTYPYTFGGGTKVEIKRTVAAPSVFIFPPSDEQLKSGTASVVCLLNNFYPREAKVQWKVDNALQSGNSQESVTEQDSKDSTYSLSSTLTLSKADYEKHKVYACEVTHQGLSSPVTKSFNRGECGGGGSGGGGSGGGGSGGGGSGGGGSGGGGSEVQLLESGGGLVQPGGSLRLSCAASGSIFSANAMGWYRQAPGKGLELVAVISSGGSTNYADSVKGRFTISRDNSKNTVYLQMNSLRAEDTAVYYCMYSGSYYYTPNDYWGQGTLVTVSS

SEQ ID NO: 269 - protein, 214 aa, Artificial Sequence
  source: /note="Description of Artificial Sequence: Synthetic polypeptide"
DIQMTQSPSSLSASVGDRVTITCKSSEKLWANVAWYQQKPGKAPKSLIYSASFRYSGVPSRFSGSGSGTDFTLTISSLQPEDFATYYCQQYYTYPYTFGGGTKVEIKRTVAAPSVFIFPPSDEQLKSGTASVVCLLNNFYPREAKVQWKVDNALQSGNSQESVTEQDSKDSTYSLSSTLTLSKADYEKHKVYACEVTHQGLSSPVTKSFNRGEC

SEQ ID NO: 270 - protein, 214 aa, Artificial Sequence
  source: /note="Description of Artificial Sequence: Synthetic polypeptide"
DIQMTQSPSSLSASVGDRVTITCKSSEKLWANVAWYQQKPGKAPKLLIYSASFRYSGVPSRFSGSGSGTDFTLTISSLQPEDFATYYCQQYYTYPYTFGGGTKVEIKRTVAAPSVFIFPPSDEQLKSGTASVVCLLNNFYPREAKVQWKVDNALQSGNSQESVTEQDSKDSTYSLSSTLTLSKADYEKHKVYACEVTHQGLSSPVTKSFNRGEC

SEQ ID NO: 271 - protein, 214 aa, Artificial Sequence
  source: /note="Description of Artificial Sequence: Synthetic polypeptide"
DIQMTQSPSSLSASVGDRVTITCKAREKLWSAVAWYQQKPGKAPKLLIYSASFRYSGVPSRFSGSGSGTDFTLTISSLQPEDFATYYCQQYYTYPYTFGGGTKVEIKRTVAAPSVFIFPPSDEQLKSGTASVVCLLNNFYPREAKVQWKVDNALQSGNSQESVTEQDSKDSTYSLSSTLTLSKADYEKHKVYACEVTHQGLSSPVTKSFNRGEC

SEQ ID NO: 272 - protein, 547 aa, Artificial Sequence
  source: /note="Description of Artificial Sequence: Synthetic polypeptide"
APTSSSTKKTQLQLEHLLLDLQMILNGINNYKNPKLTRMLTFKFYMPKKATELKHLQCLEEELKPLEEVLNLAQSKNFHLRPRDLISNINVIVLELKGSETTFMCEYADETATIVEFLNRWITFCQSIISTLTSGGPGPAGLYAQPGSEVQLVESGGGLVQPGNSLRLSCAASGFTFSKFGMSWVRQAPGKGLEWVSSISGSGRDTLYAESVKGRFTISRDNAKTTLYLQMNSLRPEDTAVYYCTIGGSLSVSSQGTLVTVSSGGGGSGGGGSGGGGSGGGGSGGGGSGGGGSSGGPGPAGLYAQPGSEVQLVESGGGLVQPGGSLRLSCAASGFTFSSYTLAWVRQAPGKGLEWVAAIDSSSYTYSPDTVRGRFTISRDNAKNSLYLQMNSLRAEDTAVYYCARDSNWDALDYWGQGTTVTVSSGGGGSGGGGSGGGGSDIQMTQSPSSLSASVGDRVTITCKSSEKLWANVAWYQQKPGKAPKALIYSASFRYSGVPSRFSGSGSGTDFTLTISSLQPEDFATYYCQQYYTYPYTFGGGTKVEIK

SEQ ID NO: 273 - protein, 547 aa, Artificial Sequence
  source: /note="Description of Artificial Sequence: Synthetic polypeptide"
APTSSSTKKTQLQLEHLLLDLQMILNGINNYKNPKLTRMLTFKFYMPKKATELKHLQCLEEELKPLEEVLNLAQSKNFHLRPRDLISNINVIVLELKGSETTFMCEYADETATIVEFLNRWITFCQSIISTLTSGGPGPAGLYAQPGSEVQLVESGGGLVQPGNSLRLSCAASGFTFSKFGMSWVRQAPGKGLEWVSSISGSGRDTLYAESVKGRFTISRDNAKTTLYLQMNSLRPEDTAVYYCTIGGSLSVSSQGTLVTVSSGGGGSGGGGSGGGGSGGGGSGGGGSGGGGSSGGPGPAGLYAQPGSEVQLVESGGGLVQPGGSLRLSCAASGFTFSSYTLAWVRQAPGKGLEWVAAIDSSSYTYSPDTVRGRFTISRDNAKNSLYLQMNSLRAEDTAVYYCARDSNWDALDYWGQGTTVTVSSGGGGSGGGGSGGGGSDIQMTQSPSSLSASVGDRVTITCKSSEKLWANVAWYQQKPGKAPKSLIYSASFRYSGVPSRFSGSGSGTDFTLTISSLQPEDFATYYCQQYYTYPYTFGGGTKVEIK

SEQ ID NO: 274 - protein, 547 aa, Artificial Sequence
  source: /note="Description of Artificial Sequence: Synthetic polypeptide"
APTSSSTKKTQLQLEHLLLDLQMILNGINNYKNPKLTRMLTFKFYMPKKATELKHLQCLEEELKPLEEVLNLAQSKNFHLRPRDLISNINVIVLELKGSETTFMCEYADETATIVEFLNRWITFCQSIISTLTSGGPGPAGLYAQPGSEVQLVESGGGLVQPGNSLRLSCAASGFTFSKFGMSWVRQAPGKGLEWVSSISGSGRDTLYAESVKGRFTISRDNAKTTLYLQMNSLRPEDTAVYYCTIGGSLSVSSQGTLVTVSSGGGGSGGGGSGGGGSGGGGSGGGGSGGGGSSGGPGPAGLYAQPGSEVQLVESGGGLVQPGGSLRLSCAASGFTFSSYTLAWVRQAPGKGLEWVAAIDSSSYTYSPDTVRGRFTISRDNAKNSLYLQMNSLRAEDTAVYYCARDSNWDALDYWGQGTTVTVSSGGGGSGGGGSGGGGSDIQMTQSPSSLSASVGDRVTITCKSSEKLWANVAWYQQKPGKAPKLLIYSASFRYSGVPSRFSGSGSGTDFTLTISSLQPEDFATYYCQQYYTYPYTFGGGTKVEIK

SEQ ID NO: 275 - protein, 547 aa, Artificial Sequence
  source: /note="Description of Artificial Sequence: Synthetic polypeptide"
APTSSSTKKTQLQLEHLLLDLQMILNGINNYKNPKLTRMLTFKFYMPKKATELKHLQCLEEELKPLEEVLNLAQSKNFHLRPRDLISNINVIVLELKGSETTFMCEYADETATIVEFLNRWITFCQSIISTLTSGGPGPAGLYAQPGSEVQLVESGGGLVQPGNSLRLSCAASGFTFSKFGMSWVRQAPGKGLEWVSSISGSGRDTLYAESVKGRFTISRDNAKTTLYLQMNSLRPEDTAVYYCTIGGSLSVSSQGTLVTVSSGGGGSGGGGSGGGGSGGGGSGGGGSGGGGSSGGPGPAGLYAQPGSEVQLVESGGGLVQPGGSLRLSCAASGFTFSSYTLAWVRQAPGKCLEWVAAIDSSSYTYSPDTVRGRFTISRDNAKNSLYLQMNSLRAEDTAVYYCARDSNWDALDYWGQGTTVTVSSGGGGSGGGGSGGGGSDIQMTQSPSSLSASVGDRVTITCKSSEKLWANVAWYQQKPGKAPKSLIYSASFRYSGVPSRFSGSGSGTDFTLTISSLQPEDFATYYCQQYYTYPYTFGCGTKVEIK

SEQ ID NO: 276 - protein, 547 aa, Artificial Sequence
  source: /note="Description of Artificial Sequence: Synthetic polypeptide"
APTSSSTKKTQLQLEHLLLDLQMILNGINNYKNPKLTRMLTFKFYMPKKATELKHLQCLEEELKPLEEVLNLAQSKNFHLRPRDLISNINVIVLELKGSETTFMCEYADETATIVEFLNRWITFCQSIISTLTSGGPGPAGLYAQPGSEVQLVESGGGLVQPGNSLRLSCAASGFTFSKFGMSWVRQAPGKGLEWVSSISGSGRDTLYAESVKGRFTISRDNAKTTLYLQMNSLRPEDTAVYYCTIGGSLSVSSQGTLVTVSSGGGGSGGGGSGGGGSGGGGSGGGGSGGGGSSGGPGPAGLYAQPGSEVQLVESGGGLVQPGGSLRLSCAASGFTFSSYTLAWVRQAPGKCLEWVAAIDSSSYTYSPDTVRGRFTISRDNAKNSLYLQMNSLRAEDTAVYYCARDSNWDALDYWGQGTTVTVSSGGGGSGGGGSGGGGSDIQMTQSPSSLSASVGDRVTITCKSSEKLWANVAWYQQKPGKAPKLLIYSASFRYSGVPSRFSGSGSGTDFTLTISSLQPEDFATYYCQQYYTYPYTFGCGTKVEIK

SEQ ID NO: 277 - protein, 547 aa, Artificial Sequence
  source: /note="Description of Artificial Sequence: Synthetic polypeptide"
APTSSSTKKTQLQLEHLLLDLQMILNGINNYKNPKLTRMLTFKFYMPKKATELKHLQCLEEELKPLEEVLNLAQSKNFHLRPRDLISNINVIVLELKGSETTFMCEYADETATIVEFLNRWITFCQSIISTLTSGGPGPAGLYAQPGSEVQLVESGGGLVQPGNSLRLSCAASGFTFSKFGMSWVRQAPGKGLEWVSSISGSGRDTLYAESVKGRFTISRDNAKTTLYLQMNSLRPEDTAVYYCTIGGSLSVSSQGTLVTVSSGGGGSGGGGSGGGGSGGGGSGGGGSGGGGSSGGPGPAGLYAQPGSEVQLVESGGGLVQPGGSLRLSCAASGFTFSSYTLAWVRQAPGKGLEWVAAIDSSSYTYSPDTVRGRFTISRDNAKNSLYLQMNSLRAEDTAVYYCARDSNWDALDYWGCGTTVTVSSGGGGSGGGGSGGGGSDIQMTQSPSSLSASVGDRVTITCKSSEKLWANVAWYQQKPGKCPKALIYSASFRYSGVPSRFSGSGSGTDFTLTISSLQPEDFATYYCQQYYTYPYTFGGGTKVEIK

SEQ ID NO: 278 - protein, 547 aa, Artificial Sequence
  source: /note="Description of Artificial Sequence: Synthetic polypeptide"
APTSSSTKKTQLQLEHLLLDLQMILNGINNYKNPKLTRMLTFKFYMPKKATELKHLQCLEEELKPLEEVLNLAQSKNFHLRPRDLISNINVIVLELKGSETTFMCEYADETATIVEFLNRWITFCQSIISTLTSGGPGPAGLYAQPGSEVQLVESGGGLVQPGNSLRLSCAASGFTFSKFGMSWVRQAPGKGLEWVSSISGSGRDTLYAESVKGRFTISRDNAKTTLYLQMNSLRPEDTAVYYCTIGGSLSVSSQGTLVTVSSGGGGSGGGGSGGGGSGGGGSGGGGSGGGGSSGGPGPAGLYAQPGSEVQLVESGGGLVQPGGSLRLSCAASGFTFSSYTLAWVRQAPGKGLEWVAAIDSSSYTYSPDTVRGRFTISRDNAKNSLYLQMNSLRAEDTAVYYCARDSNWDALDYWGQGTTVTVSSSGGPGPAGLYAQPGSDIQMTQSPSSLSASVGDRVTITCKAREKLWSAVAWYQQKPGKAPKLLIYSASFRYSGVPSRFSGSGSGTDFTLTISSLQPEDFATYYCQQYYTYPYTFGGGTKVEIK

SEQ ID NO: 279 - protein, 547 aa, Artificial Sequence
  source: /note="Description of Artificial Sequence: Synthetic polypeptide"
APTSSSTKKTQLQLEHLLLDLQMILNGINNYKNPKLTRMLTFKFYMPKKATELKHLQCLEEELKPLEEVLNLAQSKNFHLRPRDLISNINVIVLELKGSETTFMCEYADETATIVEFLNRWITFCQSIISTLTSGGPGPAGLYAQPGSEVQLVESGGGLVQPGNSLRLSCAASGFTFSKFGMSWVRQAPGKGLEWVSSISGSGRDTLYAESVKGRFTISRDNAKTTLYLQMNSLRPEDTAVYYCTIGGSLSVSSQGTLVTVSSGGGGSGGGGSGGGGSGGGGSGGGGSGGGGSSGGPGPAGLYAQPGSEVQLVESGGGLVQPGGSLRLSCAASGFTFSSYTLAWVRQAPGKGLEWVAAIDSSSYTYSPDTVRGRFTISRDNAKNSLYLQMNSLRAEDTAVYYCARDSNWDALDYWGQGTTVTVSSGGGGSGGGGSGGGGSDIQMTQSPSSLSASVGDRVTITCKAREKLWSAVAWYQQKPGKAPKLLIYSASFRYSGVPSRFSGSGSGTDFTLTISSLQPEDFATYYCQQYYTYPYTFGGGTKVEIK

SEQ ID NO: 280 - protein, 547 aa, Artificial Sequence
  source: /note="Description of Artificial Sequence: Synthetic polypeptide"
APTSSSTKKTQLQLEHLLLDLQMILNGINNYKNPKLTRMLTFKFYMPKKATELKHLQCLEEELKPLEEVLNLAQSKNFHLRPRDLISNINVIVLELKGSETTFMCEYADETATIVEFLNRWITFCQSIISTLTSGGPGPAGLYAQPGSEVQLVESGGGLVQPGNSLRLSCAASGFTFSKFGMSWVRQAPGKGLEWVSSISGSGRDTLYAESVKGRFTISRDNAKTTLYLQMNSLRPEDTAVYYCTIGGSLSVSSQGTLVTVSSGGGGSGGGGSGGGGSGGGGSGGGGSGGGGSSGGPGPAGLYAQPGSEVQLVESGGGLVQPGGSLRLSCAASGFTFSSYTLAWVRQAPGKCLEWVAAIDSSSYTYSPDTVRGRFTISRDNAKNSLYLQMNSLRAEDTAVYYCARDSNWDALDYWGQGTTVTVSSGGGGSGGGGSGGGGSDIQMTQSPSSLSASVGDRVTITCKAREKLWSAVAWYQQKPGKAPKLLIYSASFRYSGVPSRFSGSGSGTDFTLTISSLQPEDFATYYCQQYYTYPYTFGCGTKVEIK

SEQ ID NO: 281 - protein, 547 aa, Artificial Sequence
  source: /note="Description of Artificial Sequence: Synthetic polypeptide"
APTSSSTKKTQLQLEHLLLDLQMILNGINNYKNPKLTRMLTFKFYMPKKATELKHLQCLEEELKPLEEVLNLAQSKNFHLRPRDLISNINVIVLELKGSETTFMCEYADETATIVEFLNRWITFCQSIISTLTSGGPALFKSSFPPGSEVQLVESGGGLVQPGNSLRLSCAASGFTFSKFGMSWVRQAPGKGLEWVSSISGSGRDTLYAESVKGRFTISRDNAKTTLYLQMNSLRPEDTAVYYCTIGGSLSVSSQGTLVTVSSGGGGSGGGGSGGGGSGGGGSGGGGSGGGGSSGGPALFKSSFPPGSEVQLVESGGGLVQPGGSLRLSCAASGFTFSSYTLAWVRQAPGKGLEWVAAIDSSSYTYSPDTVRGRFTISRDNAKNSLYLQMNSLRAEDTAVYYCARDSNWDALDYWGQGTTVTVSSGGGGSGGGGSGGGGSDIQMTQSPSSLSASVGDRVTITCKAREKLWSAVAWYQQKPGKAPKSLIYSASFRYSGVPSRFSGSGSGTDFTLTISSLQPEDFATYYCQQYYTYPYTFGGGTKVEIK

SEQ ID NO: 282 - protein, 547 aa, Artificial Sequence
  source: /note="Description of Artificial Sequence: Synthetic polypeptide"
APTSSSTKKTQLQLEHLLLDLQMILNGINNYKNPKLTRMLTFKFYMPKKATELKHLQCLEEELKPLEEVLNLAQSKNFHLRPRDLISNINVIVLELKGSETTFMCEYADETATIVEFLNRWITFCQSIISTLTSGGPALFKSSFPPGSEVQLVESGGGLVQPGNSLRLSCAASGFTFSKFGMSWVRQAPGKGLEWVSSISGSGRDTLYAESVKGRFTISRDNAKTTLYLQMNSLRPEDTAVYYCTIGGSLSVSSQGTLVTVSSGGGGSGGGGSGGGGSGGGGSGGGGSGGGGSSGGPALFKSSFPPGSEVQLVESGGGLVQPGGSLRLSCAASGFTFSSYTLAWVRQAPGKGLEWVAAIDSSSYTYSPDTVRGRFTISRDNAKNSLYLQMNSLRAEDTAVYYCARDSNWDALDYWGQGTTVTVSSGGGGSGGGGSGGGGSDIQMTQSPSSLSASVGDRVTITCKVTEKVWGNVAWYQQKPGKAPISLIYSPSLRKSGVPSRFSGSGSGTDFTLTISSLQPEDFATYYCQQYYTYPYTFGGGTKVEIK

SEQ ID NO: 283 - protein, 547 aa, Artificial Sequence
  source: /note="Description of Artificial Sequence: Synthetic polypeptide"
APTSSSTKKTQLQLEHLLLDLQMILNGINNYKNPKLTRMLTFKFYMPKKATELKHLQCLEEELKPLEEVLNLAQSKNFHLRPRDLISNINVIVLELKGSETTFMCEYADETATIVEFLNRWITFCQSIISTLTSGGPALFKSSFPPGSEVQLVESGGGLVQPGNSLRLSCAASGFTFSKFGMSWVRQAPGKGLEWVSSISGSGRDTLYAESVKGRFTISRDNAKTTLYLQMNSLRPEDTAVYYCTIGGSLSVSSQGTLVTVSSGGGGSGGGGSGGGGSGGGGSGGGGSGGGGSSGGPALFKSSFPPGSEVQLVESGGGLVQPGGSLRLSCAASGFTFSSYTLAWVRQAPGKCLEWVAAIDSSSYTYSPDTVRGRFTISRDNAKNSLYLQMNSLRAEDTAVYYCARDSNWDALDYWGQGTTVTVSSGGGGSGGGGSGGGGSDIQMTQSPSSLSASVGDRVTITCKAREKLWSAVAWYQQKPGKAPKSLIYSASFRYSGVPSRFSGSGSGTDFTLTISSLQPEDFATYYCQQYYTYPYTFGCGTKVEIK

SEQ ID NO: 284 - protein, 547 aa, Artificial Sequence
  source: /note="Description of Artificial Sequence: Synthetic polypeptide"
APTSSSTKKTQLQLEHLLLDLQMILNGINNYKNPKLTRMLTFKFYMPKKATELKHLQCLEEELKPLEEVLNLAQSKNFHLRPRDLISNINVIVLELKGSETTFMCEYADETATIVEFLNRWITFCQSIISTLTSGGPALFKSSFPPGSEVQLVESGGGLVQPGNSLRLSCAASGFTFSKFGMSWVRQAPGKGLEWVSSISGSGRDTLYAESVKGRFTISRDNAKTTLYLQMNSLRPEDTAVYYCTIGGSLSVSSQGTLVTVSSGGGGSGGGGSGGGGSGGGGSGGGGSGGGGSSGGPALFKSSFPPGSEVQLVESGGGLVQPGGSLRLSCAASGFTFSSYTLAWVRQAPGKGLEWVAAIDSSSYTYSPDTVRGRFTISRDNAKNSLYLQMNSLRAEDTAVYYCARDSNWDALDYWGCGTTVTVSSGGGGSGGGGSGGGGSDIQMTQSPSSLSASVGDRVTITCKAREKLWSAVAWYQQKPGKCPKALIYSASFRYSGVPSRFSGSGSGTDFTLTISSLQPEDFATYYCQQYYTYPYTFGGGTKVEIK

SEQ ID NO: 285 - protein, 547 aa, Artificial Sequence
  source: /note="Description of Artificial Sequence: Synthetic polypeptide"
APTSSSTKKTQLQLEHLLLDLQMILNGINNYKNPKLTRMLTFKFYMPKKATELKHLQCLEEELKPLEEVLNLAQSKNFHLRPRDLISNINVIVLELKGSETTFMCEYADETATIVEFLNRWITFCQSIISTLTSGGPALFKSSFPPGSEVQLVESGGGLVQPGNSLRLSCAASGFTFSKFGMSWVRQAPGKGLEWVSSISGSGRDTLYAESVKGRFTISRDNAKTTLYLQMNSLRPEDTAVYYCTIGGSLSVSSQGTLVTVSSGGGGSGGGGSGGGGSGGGGSGGGGSGGGGSSGGPALFKSSFPPGSEVQLVESGGGLVQPGGSLRLSCAASGFTFSSYTLAWVRQAPGKCLEWVAAIDSSSYTYSPDTVRGRFTISRDNAKNSLYLQMNSLRAEDTAVYYCARDSNWDALDYWGQGTTVTVSSGGGGSGGGGSGGGGSDIQMTQSPSSLSASVGDRVTITCKVTEKVWGNVAWYQQKPGKAPISLIYSPSLRKSGVPSRFSGSGSGTDFTLTISSLQPEDFATYYCQQYYTYPYTFGCGTKVEIK

SEQ ID NO: 286 - protein, 528 aa, Artificial Sequence
  source: /note="Description of Artificial Sequence: Synthetic polypeptide"
APTSSSTKKTQLQLEHLLLDLQMILNGINNYKNPKLTRMLTFKFYMPKKATELKHLQCLEEELKPLEEVLNLAQSKNFHLRPRDLISNINVIVLELKGSETTFMCEYADETATIVEFLNRWITFCQSIISTLTSGGPALFKSSFPPGSEVQLVESGGGLVQPGNSLRLSCAASGFTFSKFGMSWVRQAPGKGLEWVSSISGSGRDTLYAESVKGRFTISRDNAKTTLYLQMNSLRPEDTAVYYCTIGGSLSVSSQGTLVTVSSGGGGSGGGGSGGGGSGGGGSGGGGSGGGGSSGGPALFKSSFPPGSEVQLVESGGGLVQPGGSLRLSCAASGFTFSSYTLAWVRQAPGKGLEWVAAIDSSSYTYSPDTVRGRFTISRDNAKNSLYLQMNSLRAEDTAVYYCARDSNWDALDYWGQGTTVTVSSASTKGPSVFPLAPSSKSTSGGTAALGCLVKDYFPEPVTVSWNSGALTSGVHTFPAVLQSSGLYSLSSVVTVPSSSLGTQTYICNVNHKPSNTKVDKRVEPKSC

SEQ ID NO: 287 - protein, 642 aa, Artificial Sequence
  source: /note="Description of Artificial Sequence: Synthetic polypeptide"
ESKYGPPCPPCPAPEFLGGPSVFLFPPKPKDTLMISRTPEVTCVVVDVSQEDPEVQFNWYVDGVEVHNAKTKPREEQFNSTYRVVSVLTVLHQDWLNGKEYKCKVSNKGLPSSIEKTISKAKGQPREPQVYTLPPSQEEMTKNQVSLTCLVKGFYPSDIAVEWESNGQPENNYKTTPPVLDSDGSFFLYSRLTVDKSRWQEGNVFSCSVMHEALHNHYTQKSLSLSLGKSGGPALFKSSFPPGSAPTSSSTKKTQLQLEHLLLDLQMILNGINNYKNPKLTRMLTFKFYMPKKATELKHLQCLEEELKPLEEVLNLAQSKNFHLRPRDLISNINVIVLELKGSETTFMCEYADETATIVEFLNRWITFCQSIISTLTGGGGSGGGGSGGGGSGGGGSGGGGSGGGGSSGGPALFKSSFPPGSEVQLVESGGGLVQPGGSLRLSCAASGFTFSSYTLAWVRQAPGKGLEWVAAIDSSSYTYSPDTVRGRFTISRDNAKNSLYLQMNSLRAEDTAVYYCARDSNWDALDYWGQGTTVTVSSASTKGPSVFPLAPSSKSTSGGTAALGCLVKDYFPEPVTVSWNSGALTSGVHTFPAVLQSSGLYSLSSVVTVPSSSLGTQTYICNVNHKPSNTKVDKRVEPKSC

SEQ ID NO: 288 - protein, 661 aa, Artificial Sequence
  source: /note="Description of Artificial Sequence: Synthetic polypeptide"
ESKYGPPCPPCPAPEFLGGPSVFLFPPKPKDTLMISRTPEVTCVVVDVSQEDPEVQFNWYVDGVEVHNAKTKPREEQFNSTYRVVSVLTVLHQDWLNGKEYKCKVSNKGLPSSIEKTISKAKGQPREPQVYTLPPSQEEMTKNQVSLTCLVKGFYPSDIAVEWESNGQPENNYKTTPPVLDSDGSFFLYSRLTVDKSRWQEGNVFSCSVMHEALHNHYTQKSLSLSLGKSGGPALFKSSFPPGSAPTSSSTKKTQLQLEHLLLDLQMILNGINNYKNPKLTRMLTFKFYMPKKATELKHLQCLEEELKPLEEVLNLAQSKNFHLRPRDLISNINVIVLELKGSETTFMCEYADETATIVEFLNRWITFCQSIISTLTGGGGSGGGGSGGGGSGGGGSGGGGSGGGGSSGGPALFKSSFPPGSEVQLVESGGGLVQPGGSLRLSCAASGFTFSSYTLAWVRQAPGKGLEWVAAIDSSSYTYSPDTVRGRFTISRDNAKNSLYLQMNSLRAEDTAVYYCARDSNWDALDYWGQGTTVTVSSGGGGSGGGGSGGGGSDIQMTQSPSSLSASVGDRVTITCKAREKLWSAVAWYQQKPGKAPKSLIYSASFRYSGVPSRFSGSGSGTDFTLTISSLQPEDFATYYCQQYYTYPYTFGGGTKVEIK

SEQ ID NO: 289 - protein, 661 aa, Artificial Sequence
  source: /note="Description of Artificial Sequence: Synthetic polypeptide"
ESKYGPPCPPCPAPEFLGGPSVFLFPPKPKDTLMISRTPEVTCVVVDVSQEDPEVQFNWYVDGVEVHNAKTKPREEQFNSTYRVVSVLTVLHQDWLNGKEYKCKVSNKGLPSSIEKTISKAKGQPREPQVYTLPPSQEEMTKNQVSLTCLVKGFYPSDIAVEWESNGQPENNYKTTPPVLDSDGSFFLYSRLTVDKSRWQEGNVFSCSVMHEALHNHYTQKSLSLSLGKSGGPALFKSSFPPGSAPTSSSTKKTQLQLEHLLLDLQMILNGINNYKNPKLTRMLTFKFYMPKKATELKHLQCLEEELKPLEEVLNLAQSKNFHLRPRDLISNINVIVLELKGSETTFMCEYADETATIVEFLNRWITFCQSIISTLTGGGGSGGGGSGGGGSGGGGSGGGGSGGGGSSGGPALFKSSFPPGSEVQLVESGGGLVQPGGSLRLSCAASGFTFSSYTLAWVRQAPGKGLEWVAAIDSSSYTYSPDTVRGRFTISRDNAKNSLYLQMNSLRAEDTAVYYCARDSNWDALDYWGQGTTVTVSSGGGGSGGGGSGGGGSDIQMTQSPSSLSASVGDRVTITCKVTEKVWGNVAWYQQKPGKAPISLIYSPSLRKSGVPSRFSGSGSGTDFTLTISSLQPEDFATYYCQQYYTYPYTFGGGTKVEIK

SEQ ID NO: 290 - protein, 661 aa, Artificial Sequence
  source: /note="Description of Artificial Sequence: Synthetic polypeptide"
ESKYGPPCPPCPAPEFLGGPSVFLFPPKPKDTLMISRTPEVTCVVVDVSQEDPEVQFNWYVDGVEVHNAKTKPREEQFNSTYRVVSVLTVLHQDWLNGKEYKCKVSNKGLPSSIEKTISKAKGQPREPQVYTLPPSQEEMTKNQVSLTCLVKGFYPSDIAVEWESNGQPENNYKTTPPVLDSDGSFFLYSRLTVDKSRWQEGNVFSCSVMHEALHNHYTQKSLSLSLGKSGGPALFKSSFPPGSAPTSSSTKKTQLQLEHLLLDLQMILNGINNYKNPKLTRMLTFKFYMPKKATELKHLQCLEEELKPLEEVLNLAQSKNFHLRPRDLISNINVIVLELKGSETTFMCEYADETATIVEFLNRWITFCQSIISTLTGGGGSGGGGSGGGGSGGGGSGGGGSGGGGSSGGPALFKSSFPPGSEVQLVESGGGLVQPGGSLRLSCAASGFTFSSYTLAWVRQAPGKCLEWVAAIDSSSYTYSPDTVRGRFTISRDNAKNSLYLQMNSLRAEDTAVYYCARDSNWDALDYWGQGTTVTVSSGGGGSGGGGSGGGGSDIQMTQSPSSLSASVGDRVTITCKAREKLWSAVAWYQQKPGKAPKSLIYSASFRYSGVPSRFSGSGSGTDFTLTISSLQPEDFATYYCQQYYTYPYTFGCGTKVEIK

SEQ ID NO: 291 - protein, 661 aa, Artificial Sequence
  source: /note="Description of Artificial Sequence: Synthetic polypeptide"
ESKYGPPCPPCPAPEFLGGPSVFLFPPKPKDTLMISRTPEVTCVVVDVSQEDPEVQFNWYVDGVEVHNAKTKPREEQFNSTYRVVSVLTVLHQDWLNGKEYKCKVSNKGLPSSIEKTISKAKGQPREPQVYTLPPSQEEMTKNQVSLTCLVKGFYPSDIAVEWESNGQPENNYKTTPPVLDSDGSFFLYSRLTVDKSRWQEGNVFSCSVMHEALHNHYTQKSLSLSLGKSGGPALFKSSFPPGSAPTSSSTKKTQLQLEHLLLDLQMILNGINNYKNPKLTRMLTFKFYMPKKATELKHLQCLEEELKPLEEVLNLAQSKNFHLRPRDLISNINVIVLELKGSETTFMCEYADETATIVEFLNRWITFCQSIISTLTGGGGSGGGGSGGGGSGGGGSGGGGSGGGGSSGGPALFKSSFPPGSEVQLVESGGGLVQPGGSLRLSCAASGFTFSSYTLAWVRQAPGKGLEWVAAIDSSSYTYSPDTVRGRFTISRDNAKNSLYLQMNSLRAEDTAVYYCARDSNWDALDYWGCGTTVTVSSGGGGSGGGGSGGGGSDIQMTQSPSSLSASVGDRVTITCKAREKLWSAVAWYQQKPGKCPKALIYSASFRYSGVPSRFSGSGSGTDFTLTISSLQPEDFATYYCQQYYTYPYTFGGGTKVEIK

SEQ ID NO: 292 - protein, 661 aa, Artificial Sequence
  source: /note="Description of Artificial Sequence: Synthetic polypeptide"
ESKYGPPCPPCPAPEFLGGPSVFLFPPKPKDTLMISRTPEVTCVVVDVSQEDPEVQFNWYVDGVEVHNAKTKPREEQFNSTYRVVSVLTVLHQDWLNGKEYKCKVSNKGLPSSIEKTISKAKGQPREPQVYTLPPSQEEMTKNQVSLTCLVKGFYPSDIAVEWESNGQPENNYKTTPPVLDSDGSFFLYSRLTVDKSRWQEGNVFSCSVMHEALHNHYTQKSLSLSLGKSGGPALFKSSFPPGSAPTSSSTKKTQLQLEHLLLDLQMILNGINNYKNPKLTRMLTFKFYMPKKATELKHLQCLEEELKPLEEVLNLAQSKNFHLRPRDLISNINVIVLELKGSETTFMCEYADETATIVEFLNRWITFCQSIISTLTGGGGSGGGGSGGGGSGGGGSGGGGSGGGGSSGGPALFKSSFPPGSEVQLVESGGGLVQPGGSLRLSCAASGFTFSSYTLAWVRQAPGKCLEWVAAIDSSSYTYSPDTVRGRFTISRDNAKNSLYLQMNSLRAEDTAVYYCARDSNWDALDYWGQGTTVTVSSGGGGSGGGGSGGGGSDIQMTQSPSSLSASVGDRVTITCKVTEKVWGNVAWYQQKPGKAPISLIYSPSLRKSGVPSRFSGSGSGTDFTLTISSLQPEDFATYYCQQYYTYPYTFGCGTKVEIK

SEQ ID NO: 293 - protein, 661 aa, Artificial Sequence
  source: /note="Description of Artificial Sequence: Synthetic polypeptide"
ESKYGPPCPPCPAPEFLGGPSVFLFPPKPKDTLMISRTPEVTCVVVDVSQEDPEVQFNWYVDGVEVHNAKTKPREEQFNSTYRVVSVLTVLHQDWLNGKEYKCKVSNKGLPSSIEKTISKAKGQPREPQVYTLPPSQEEMTKNQVSLTCLVKGFYPSDIAVEWESNGQPENNYKTTPPVLDSDGSFFLYSRLTVDKSRWQEGNVFSCSVMHEALHNHYTQKSLSLSLGKSGGPALFKSSFPPGSAPTSSSTKKTQLQLEHLLLDLQMILNGINNYKNPKLTRMLTFKFYMPKKATELKHLQCLEEELKPLEEVLNLAQSKNFHLRPRDLISNINVIVLELKGSETTFMCEYADETATIVEFLNRWITFCQSIISTLTGGGGSGGGGSGGGGSGGGGSGGGGSGGGGSSGGPALFKSSFPPGSEVQLVESGGGLVQPGGSLRLSCAASGFTFSSYTLAWVRQAPGKGLEWVAAIDSSSYTYSPDTVRGRFTISRDNAKNSLYLQMNSLRAEDTAVYYCARDSNWDALDYWGCGTTVTVSSGGGGSGGGGSGGGGSDIQMTQSPSSLSASVGDRVTITCKVTEKVWGNVAWYQQKPGKCPISLIYSPSLRKSGVPSRFSGSGSGTDFTLTISSLQPEDFATYYCQQYYTYPYTFGGGTKVEIK

SEQ ID NO: 294 - protein, 659 aa, Artificial Sequence
  source: /note="Description of Artificial Sequence: Synthetic polypeptide"
VPRDCGCKPCICTVPEVSSVFIFPPKPKDVLTITLTPKVTCVVVDISKDDPEVQFSWFVDDVEVHTAQTQPREEQFNSTFRSVSELPIMHQDWLNGKEFKCRVNSAAFPAPIEKTISKTKGRPKAPQVYTIPPPKEQMAKDKVSLTCMITDFFPEDITVEWQWNGQPAENYKNTQPIMDTDGSYFVYSKLNVQKSNWEAGNTFTCSVLHEGLHNHHTEKSLSHSPGKSGGPALFKSSFPPGSAPTSSSTKKTQLQLEHLLLDLQMILNGINNYKNPKLTRMLTFKFYMPKKATELKHLQCLEEELKPLEEVLNLAQSKNFHLRPRDLISNINVIVLELKGSETTFMCEYADETATIVEFLNRWITFCQSIISTLTGGGGSGGGGSGGGGSGGGGSGGGGSGGGGSSGGPALFKSSFPPGSEVQLVESGGGLVQPGGSLRLSCAASGFTFSSYTLAWVRQAPGKGLEWVAAIDSSSYTYSPDTVRGRFTISRDNAKNSLYLQMNSLRAEDTAVYYCARDSNWDALDYWGQGTTVTVSSGGGGSGGGGSGGGGSDIQMTQSPSSLSASVGDRVTITCKAREKLWSAVAWYQQKPGKAPKSLIYSASFRYSGVPSRFSGSGSGTDFTLTISSLQPEDFATYYCQQYYTYPYTFGGGTKVEIK

SEQ ID NO: 295 - protein, 659 aa, Artificial Sequence
  source: /note="Description of Artificial Sequence: Synthetic polypeptide"
VPRDCGCKPCICTVPEVSSVFIFPPKPKDVLTITLTPKVTCVVVDISKDDPEVQFSWFVDDVEVHTAQTQPREEQFNSTFRSVSELPIMHQDWLNGKEFKCRVNSAAFPAPIEKTISKTKGRPKAPQVYTIPPPKEQMAKDKVSLTCMITDFFPEDITVEWQWNGQPAENYKNTQPIMDTDGSYFVYSKLNVQKSNWEAGNTFTCSVLHEGLHNHHTEKSLSHSPGKSGGPALFKSSFPPGSAPTSSSTKKTQLQLEHLLLDLQMILNGINNYKNPKLTRMLTFKFYMPKKATELKHLQCLEEELKPLEEVLNLAQSKNFHLRPRDLISNINVIVLELKGSETTFMCEYADETATIVEFLNRWITFCQSIISTLTGGGGSGGGGSGGGGSGGGGSGGGGSGGGGSSGGPALFKSSFPPGSEVQLVESGGGLVQPGGSLRLSCAASGFTFSSYTLAWVRQAPGKGLEWVAAIDSSSYTYSPDTVRGRFTISRDNAKNSLYLQMNSLRAEDTAVYYCARDSNWDALDYWGQGTTVTVSSGGGGSGGGGSGGGGSDIQMTQSPSSLSASVGDRVTITCKVTEKVWGNVAWYQQKPGKAPISLIYSPSLRKSGVPSRFSGSGSGTDFTLTISSLQPEDFATYYCQQYYTYPYTFGGGTKVEIK

SEQ ID NO: 296 - protein, 659 aa, Artificial Sequence
  source: /note="Description of Artificial Sequence: Synthetic polypeptide"
VPRDCGCKPCICTVPEVSSVFIFPPKPKDVLTITLTPKVTCVVVDISKDDPEVQFSWFVDDVEVHTAQTQPREEQFNSTFRSVSELPIMHQDWLNGKEFKCRVNSAAFPAPIEKTISKTKGRPKAPQVYTIPPPKEQMAKDKVSLTCMITDFFPEDITVEWQWNGQPAENYKNTQPIMDTDGSYFVYSKLNVQKSNWEAGNTFTCSVLHEGLHNHHTEKSLSHSPGKSGGPALFKSSFPPGSAPTSSSTKKTQLQLEHLLLDLQMILNGINNYKNPKLTRMLTFKFYMPKKATELKHLQCLEEELKPLEEVLNLAQSKNFHLRPRDLISNINVIVLELKGSETTFMCEYADETATIVEFLNRWITFCQSIISTLTGGGGSGGGGSGGGGSGGGGSGGGGSGGGGSSGGPALFKSSFPPGSEVQLVESGGGLVQPGGSLRLSCAASGFTFSSYTLAWVRQAPGKCLEWVAAIDSSSYTYSPDTVRGRFTISRDNAKNSLYLQMNSLRAEDTAVYYCARDSNWDALDYWGQGTTVTVSSGGGGSGGGGSGGGGSDIQMTQSPSSLSASVGDRVTITCKAREKLWSAVAWYQQKPGKAPKSLIYSASFRYSGVPSRFSGSGSGTDFTLTISSLQPEDFATYYCQQYYTYPYTFGCGTKVEIK

SEQ ID NO: 297 - protein, 659 aa, Artificial Sequence
  source: /note="Description of Artificial Sequence: Synthetic polypeptide"
VPRDCGCKPCICTVPEVSSVFIFPPKPKDVLTITLTPKVTCVVVDISKDDPEVQFSWFVDDVEVHTAQTQPREEQFNSTFRSVSELPIMHQDWLNGKEFKCRVNSAAFPAPIEKTISKTKGRPKAPQVYTIPPPKEQMAKDKVSLTCMITDFFPEDITVEWQWNGQPAENYKNTQPIMDTDGSYFVYSKLNVQKSNWEAGNTFTCSVLHEGLHNHHTEKSLSHSPGKSGGPALFKSSFPPGSAPTSSSTKKTQLQLEHLLLDLQMILNGINNYKNPKLTRMLTFKFYMPKKATELKHLQCLEEELKPLEEVLNLAQSKNFHLRPRDLISNINVIVLELKGSETTFMCEYADETATIVEFLNRWITFCQSIISTLTGGGGSGGGGSGGGGSGGGGSGGGGSGGGGSSGGPALFKSSFPPGSEVQLVESGGGLVQPGGSLRLSCAASGFTFSSYTLAWVRQAPGKGLEWVAAIDSSSYTYSPDTVRGRFTISRDNAKNSLYLQMNSLRAEDTAVYYCARDSNWDALDYWGCGTTVTVSSGGGGSGGGGSGGGGSDIQMTQSPSSLSASVGDRVTITCKAREKLWSAVAWYQQKPGKCPKALIYSASFRYSGVPSRFSGSGSGTDFTLTISSLQPEDFATYYCQQYYTYPYTFGGGTKVEIK

SEQ ID NO: 298 - protein, 659 aa, Artificial Sequence
  source: /note="Description of Artificial Sequence: Synthetic polypeptide"
VPRDCGCKPCICTVPEVSSVFIFPPKPKDVLTITLTPKVTCVVVDISKDDPEVQFSWFVDDVEVHTAQTQPREEQFNSTFRSVSELPIMHQDWLNGKEFKCRVNSAAFPAPIEKTISKTKGRPKAPQVYTIPPPKEQMAKDKVSLTCMITDFFPEDITVEWQWNGQPAENYKNTQPIMDTDGSYFVYSKLNVQKSNWEAGNTFTCSVLHEGLHNHHTEKSLSHSPGKSGGPALFKSSFPPGSAPTSSSTKKTQLQLEHLLLDLQMILNGINNYKNPKLTRMLTFKFYMPKKATELKHLQCLEEELKPLEEVLNLAQSKNFHLRPRDLISNINVIVLELKGSETTFMCEYADETATIVEFLNRWITFCQSIISTLTGGGGSGGGGSGGGGSGGGGSGGGGSGGGGSSGGPALFKSSFPPGSEVQLVESGGGLVQPGGSLRLSCAASGFTFSSYTLAWVRQAPGKCLEWVAAIDSSSYTYSPDTVRGRFTISRDNAKNSLYLQMNSLRAEDTAVYYCARDSNWDALDYWGQGTTVTVSSGGGGSGGGGSGGGGSDIQMTQSPSSLSASVGDRVTITCKVTEKVWGNVAWYQQKPGKAPISLIYSPSLRKSGVPSRFSGSGSGTDFTLTISSLQPEDFATYYCQQYYTYPYTFGCGTKVEIK

SEQ ID NO: 299 - protein, 659 aa, Artificial Sequence
  source: /note="Description of Artificial Sequence: Synthetic polypeptide"
VPRDCGCKPCICTVPEVSSVFIFPPKPKDVLTITLTPKVTCVVVDISKDDPEVQFSWFVDDVEVHTAQTQPREEQFNSTFRSVSELPIMHQDWLNGKEFKCRVNSAAFPAPIEKTISKTKGRPKAPQVYTIPPPKEQMAKDKVSLTCMITDFFPEDITVEWQWNGQPAENYKNTQPIMDTDGSYFVYSKLNVQKSNWEAGNTFTCSVLHEGLHNHHTEKSLSHSPGKSGGPALFKSSFPPGSAPTSSSTKKTQLQLEHLLLDLQMILNGINNYKNPKLTRMLTFKFYMPKKATELKHLQCLEEELKPLEEVLNLAQSKNFHLRPRDLISNINVIVLELKGSETTFMCEYADETATIVEFLNRWITFCQSIISTLTGGGGSGGGGSGGGGSGGGGSGGGGSGGGGSSGGPALFKSSFPPGSEVQLVESGGGLVQPGGSLRLSCAASGFTFSSYTLAWVRQAPGKGLEWVAAIDSSSYTYSPDTVRGRFTISRDNAKNSLYLQMNSLRAEDTAVYYCARDSNWDALDYWGCGTTVTVSSGGGGSGGGGSGGGGSDIQMTQSPSSLSASVGDRVTITCKVTEKVWGNVAWYQQKPGKCPISLIYSPSLRKSGVPSRFSGSGSGTDFTLTISSLQPEDFATYYCQQYYTYPYTFGGGTKVEIK

SEQ ID NO: 300 - protein, 662 aa, Artificial Sequence
  source: /note="Description of Artificial Sequence: Synthetic polypeptide"
MDMRVPAQLLGLLLLWLRGARCVPRDCGCKPCICTVPEVSSVFIFPPKPKDVLTITLTPKVTCVVVDISKDDPEVQFSWFVDDVEVHTAQTQPREEQFNSTFRSVSELPIMHQDWLNGKEFKCRVNSAAFPAPIEKTISKTKGRPKAPQVYTIPPPKEQMAKDKVSLTCMITDFFPEDITVEWQWNGQPAENYKNTQPIMDTDGSYFVYSKLNVQKSNWEAGNTFTCSVLHEGLHNHHTEKSLSHSPGKSGGPALFKSSFPPGSAPTSSSTKKTQLQLEHLLLDLQMILNGINNYKNPKLTRMLTFKFYMPKKATELKHLQCLEEELKPLEEVLNLAQSKNFHLRPRDLISNINVIVLELKGSETTFMCEYADETATIVEFLNRWITFCQSIISTLTGGGGSGGGGSGGGGSGGGGSGGGGSGGGGSSGGPALFKSSFPPGSEVQLVESGGGLVQPGGSLRLSCAASGFTFSSYTLAWVRQAPGKGLEWVAAIDSSSYTYSPDTVRGRFTISRDNAKNSLYLQMNSLRAEDTAVYYCARDSNWDALDYWGQGTTVTVSSASTKGPSVFPLAPSSKSTSGGTAALGCLVKDYFPEPVTVSWNSGALTSGVHTFPAVLQSSGLYSLSSVVTVPSSSLGTQTYICNVNHKPSNTKVDKRVEPKSC

SEQ ID NO: 301 - protein, 214 aa, Artificial Sequence; identical to SEQ ID NO: 264
  source: /note="Description of Artificial Sequence: Synthetic polypeptide"

SEQ ID NO: 302 - protein, 661 aa, Artificial Sequence
  source: /note="Description of Artificial Sequence: Synthetic polypeptide"
ESKYGPPCPPCPAPEFLGGPSVFLFPPKPKDTLMISRTPEVTCVVVDVSQEDPEVQFNWYVDGVEVHNAKTKPREEQFNSTYRVVSVLTVLHQDWLNGKEYKCKVSNKGLPSSIEKTISKAKGQPREPQVYTLPPSQEEMTKNQVSLTCLVKGFYPSDIAVEWESNGQPENNYKTTPPVLDSDGSFFLYSRLTVDKSRWQEGNVFSCSVMHEALHNHYTQKSLSLSLGKSGGPGPAGLYAQPGSAPTSSSTKKTQLQLEHLLLDLQMILNGINNYKNPKLTRMLTFKFYMPKKATELKHLQCLEEELKPLEEVLNLAQSKNFHLRPRDLISNINVIVLELKGSETTFMCEYADETATIVEFLNRWITFCQSIISTLTGGGGSGGGGSGGGGSGGGGSGGGGSGGGGSSGGPGPAGLYAQPGSEVQLVESGGGLVQPGGSLRLSCAASGFTFSSYTLAWVRQAPGKCLEWVAAIDSSSYTYSPDTVRGRFTISRDNAKNSLYLQMNSLRAEDTAVYYCARDSNWDALDYWGQGTTVTVSSGGGGSGGGGSGGGGSDIQMTQSPSSLSASVGDRVTITCKASQNVGTNVGWYQQKPGKAPKALIYSASFRYSGVPSRFSGSGSGTDFTLTISSLQPEDFATYYCQQYYTYPYTFGCGTKVEIK

SEQ ID NO: 303 - protein, 661 aa, Artificial Sequence
  source: /note="Description of Artificial Sequence: Synthetic polypeptide"
ESKYGPPCPPCPAPEFLGGPSVFLFPPKPKDTLMISRTPEVTCVVVDVSQEDPEVQFNWYVDGVEVHNAKTKPREEQFNSTYRVVSVLTVLHQDWLNGKEYKCKVSNKGLPSSIEKTISKAKGQPREPQVYTLPPSQEEMTKNQVSLTCLVKGFYPSDIAVEWESNGQPENNYKTTPPVLDSDGSFFLYSRLTVDKSRWQEGNVFSCSVMHEALHNHYTQKSLSLSLGKSGGPGPAGLYAQPGSAPTSSSTKKTQLQLEHLLLDLQMILNGINNYKNPKLTRMLTFKFYMPKKATELKHLQCLEEELKPLEEVLNLAQSKNFHLRPRDLISNINVIVLELKGSETTFMCEYADETATIVEFLNRWITFCQSIISTLTGGGGSGGGGSGGGGSGGGGSGGGGSGGGGSSGGPGPAGLYAQPGSEVQLVESGGGLVQPGGSLRLSCAASGFTFSSYTLAWVRQAPGKGLEWVAAIDSSSYTYSPDTVRGRFTISRDNAKNSLYLQMNSLRAEDTAVYYCARDSNWDALDYWGCGTTVTVSSGGGGSGGGGSGGGGSDIQMTQSPSSLSASVGDRVTITCKASQNVGTNVGWYQQKPGKCPKALIYSASFRYSGVPSRFSGSGSGTDFTLTISSLQPEDFATYYCQQYYTYPYTFGGGTKVEIK

SEQ ID NO: 304 - protein, 661 aa, Artificial Sequence
  source: /note="Description of Artificial Sequence: Synthetic polypeptide"
ESKYGPPCPPCPAPEFLGGPSVFLFPPKPKDTLMISRTPEVTCVVVDVSQEDPEVQFNWYVDGVEVHNAKTKPREEQFNSTYRVVSVLTVLHQDWLNGKEYKCKVSNKGLPSSIEKTISKAKGQPREPQVYTLPPSQEEMTKNQVSLTCLVKGFYPSDIAVEWESNGQPENNYKTTPPVLDSDGSFFLYSRLTVDKSRWQEGNVFSCSVMHEALHNHYTQKSLSLSLGKSGGPGPAGLYAQPGSAPTSSSTKKTQLQLEHLLLDLQMILNGINNYKNPKLTRMLTFKFYMPKKATELKHLQCLEEELKPLEEVLNLAQSKNFHLRPRDLISNINVIVLELKGSETTFMCEYADETATIVEFLNRWITFCQSIISTLTGGGGSGGGGSGGGGSGGGGSGGGGSGGGGSSGGPGPAGLYAQPGSEVQLVESGGGLVQPGGSLRLSCAASGFTFSSYTLAWVRQAPGKCLEWVAAIDSSSYTYSPDTVRGRFTISRDNAKNSLYLQMNSLRAEDTAVYYCARDSNWDALDYWGQGTTVTVSSGGGGSGGGGSGGGGSDIQMTQSPSSLSASVGDRVTITCKAREKLWSAVAWYQQKPGKAPKALIYSASFRYSGVPSRFSGSGSGTDFTLTISSLQPEDFATYYCQQYYTYPYTFGCGTKVEIK

SEQ ID NO: 305 - protein, 661 aa, Artificial Sequence
  source: /note="Description of Artificial Sequence: Synthetic polypeptide"
ESKYGPPCPPCPAPEFLGGPSVFLFPPKPKDTLMISRTPEVTCVVVDVSQEDPEVQFNWYVDGVEVHNAKTKPREEQFNSTYRVVSVLTVLHQDWLNGKEYKCKVSNKGLPSSIEKTISKAKGQPREPQVYTLPPSQEEMTKNQVSLTCLVKGFYPSDIAVEWESNGQPENNYKTTPPVLDSDGSFFLYSRLTVDKSRWQEGNVFSCSVMHEALHNHYTQKSLSLSLGKSGGPGPAGLYAQPGSAPTSSSTKKTQLQLEHLLLDLQMILNGINNYKNPKLTRMLTFKFYMPKKATELKHLQCLEEELKPLEEVLNLAQSKNFHLRPRDLISNINVIVLELKGSETTFMCEYADETATIVEFLNRWITFCQSIISTLTGGGGSGGGGSGGGGSGGGGSGGGGSGGGGSSGGPGPAGLYAQPGSEVQLVESGGGLVQPGGSLRLSCAASGFTFSSYTLAWVRQAPGKGLEWVAAIDSSSYTYSPDTVRGRFTISRDNAKNSLYLQMNSLRAEDTAVYYCARDSNWDALDYWGCGTTVTVSSGGGGSGGGGSGGGGSDIQMTQSPSSLSASVGDRVTITCKAREKLWSAVAWYQQKPGKCPKALIYSASFRYSGVPSRFSGSGSGTDFTLTISSLQPEDFATYYCQQYYTYPYTFGGGTKVEIK

SEQ ID NO: 306 - protein, 661 aa, Artificial Sequence
  source: /note="Description of Artificial Sequence: Synthetic polypeptide"
ESKYGPPCPPCPAPEFLGGPSVFLFPPKPKDTLMISRTPEVTCVVVDVSQEDPEVQFNWYVDGVEVHNAKTKPREEQFNSTYRVVSVLTVLHQDWLNGKEYKCKVSNKGLPSSIEKTISKAKGQPREPQVYTLPPSQEEMTKNQVSLTCLVKGFYPSDIAVEWESNGQPENNYKTTPPVLDSDGSFFLYSRLTVDKSRWQEGNVFSCSVMHEALHNHYTQKSLSLSLGKSGGPGPAGLYAQPGSAPTSSSTKKTQLQLEHLLLDLQMILNGINNYKNPKLTRMLTFKFYMPKKATELKHLQCLEEELKPLEEVLNLAQSKNFHLRPRDLISNINVIVLELKGSETTFMCEYADETATIVEFLNRWITFCQSIISTLTGGGGSGGGGSGGGGSGGGGSGGGGSGGGGSSGGPGPAGLYAQPGSEVQLVESGGGLVQPGGSLRLSCAASGFTFSSYTLAWVRQAPGKCLEWVAAIDSSSYTYSPDTVRGRFTISRDNAKNSLYLQMNSLRAEDTAVYYCARDSNWDALDYWGQGTTVTVSSGGGGSGGGGSGGGGSDIQMTQSPSSLSASVGDRVTITCKVTEKVWGNVAWYQQKPGKAPISLIYSPSLRKSGVPSRFSGSGSGTDFTLTISSLQPEDFATYYCQQYYTYPYTFGCGTKVEIK

SEQ ID NO: 307 - protein, 661 aa, Artificial Sequence
  source: /note="Description of Artificial Sequence: Synthetic polypeptide"
ESKYGPPCPPCPAPEFLGGPSVFLFPPKPKDTLMISRTPEVTCVVVDVSQEDPEVQFNWYVDGVEVHNAKTKPREEQFNSTYRVVSVLTVLHQDWLNGKEYKCKVSNKGLPSSIEKTISKAKGQPREPQVYTLPPSQEEMTKNQVSLTCLVKGFYPSDIAVEWESNGQPENNYKTTPPVLDSDGSFFLYSRLTVDKSRWQEGNVFSCSVMHEALHNHYTQKSLSLSLGKSGGPGPAGLYAQPGSAPTSSSTKKTQLQLEHLLLDLQMILNGINNYKNPKLTRMLTFKFYMPKKATELKHLQCLEEELKPLEEVLNLAQSKNFHLRPRDLISNINVIVLELKGSETTFMCEYADETATIVEFLNRWITFCQSIISTLTGGGGSGGGGSGGGGSGGGGSGGGGSGGGGSSGGPGPAGLYAQPGSEVQLVESGGGLVQPGGSLRLSCAASGFTFSSYTLAWVRQAPGKGLEWVAAIDSSSYTYSPDTVRGRFTISRDNAKNSLYLQMNSLRAEDTAVYYCARDSNWDALDYWGCGTTVTVSSGGGGSGGGGSGGGGSDIQMTQSPSSLSASVGDRVTITCKVTEKVWGNVAWYQQKPGKCPISLIYSPSLRKSGVPSRFSGSGSGTDFTLTISSLQPEDFATYYCQQYYTYPYTFGGGTKVEIK

SEQ ID NO: 308 - protein, 541 aa, Artificial Sequence
  source: /note="Description of Artificial Sequence: Synthetic polypeptide"
ESKYGPPCPPCPAPEFLGGPSVFLFPPKPKDTLMISRTPEVTCVVVDVSQEDPEVQFNWYVDGVEVHNAKTKPREEQFNSTYRVVSVLTVLHQDWLNGKEYKCKVSNKGLPSSIEKTISKAKGQPREPQVYTLPPSQEEMTKNQVSLTCLVKGFYPSDIAVEWESNGQPENNYKTTPPVLDSDGSFFLYSRLTVDKSRWQEGNVFSCSVMHEALHNHYTQKSLSLSLGKSGGPGPAGLYAQPGSAPTSSSTKKTQLQLEHLLLDLQMILNGINNYKNPKLTRMLTFKFYMPKKATELKHLQCLEEELKPLEEVLNLAQSKNFHLRPRDLISNINVIVLELKGSETTFMCEYADETATIVEFLNRWITFCQSIISTLTGGGGSGGGGSGGGGSGGGGSGGGGSGGGGSSGGPGPAGLYAQPGSEVQLLESGGGLVQPGGSLRLSCAASGSIFSANAMGWYRQAPGKQRELVAVISSGGSTNYADSVKGRFTISRDNSKNTVYLQMNSLRAEDTAVYYCMYSGSYYYTPNDYWGQGTLVTVSS

SEQ ID NO: 309 - protein, 547 aa, Artificial Sequence
  source: /note="Description of Artificial Sequence: Synthetic polypeptide"
APTSSSTKKTQLQLEHLLLDLQMILNGINNYKNPKLTRMLTFKFYMPKKATELKHLQCLEEELKPLEEVLNLAQSKNFHLRPRDLISNINVIVLELKGSETTFMCEYADETATIVEFLNRWITFCQSIISTLTSGGPGPAGLYAQPGSEVQLVESGGGLVQPGNSLRLSCAASGFTFSKFGMSWVRQAPGKGLEWVSSISGSGRDTLYAESVKGRFTISRDNAKTTLYLQMNSLRPEDTAVYYCTIGGSLSVSSQGTLVTVSSGGGGSGGGGSGGGGSGGGGSGGGGSGGGGSSGGPGPAGLYAQPGSEVQLVESGGGLVQPGGSLRLSCAASGFTFSSYTLAWVRQAPGKCLEWVAAIDSSSYTYSPDTVRGRFTISRDNAKNSLYLQMNSLRAEDTAVYYCARDSNWDALDYWGQGTTVTVSSGGGGSGGGGSGGGGSDIQMTQSPSSLSASVGDRVTITCKAREKLWSAVAWYQQKPGKAPKSLIYSASFRYSGVPSRFSGSGSGTDFTLTISSLQPEDFATYYCQQYYTYPYTFGCGTKVEIK

SEQ ID NO: 310 - protein, 661 aa, Artificial Sequence
  source: /note="Description of Artificial Sequence: Synthetic polypeptide"
ESKYGPPCPPCPAPEFLGGPSVFLFPPKPKDTLMISRTPEVTCVVVDVSQEDPEVQFNWYVDGVEVHNAKTKPREEQFNSTYRVVSVLTVLHQDWLNGKEYKCKVSNKGLPSSIEKTISKAKGQPREPQVYTLPPSQEEMTKNQVSLTCLVKGFYPSDIAVEWESNGQPENNYKTTPPVLDSDGSFFLYSRLTVDKSRWQEGNVFSCSVMHEALHNHYTQKSLSLSLGKSGGPGPAGLYAQPGSAPTSSSTKKTQLQLEHLLLDLQMILNGINNYKNPKLTRMLTFKFYMPKKATELKHLQCLEEELKPLEEVLNLAQSKNFHLRPRDLISNINVIVLELKGSETTFMCEYADETATIVEFLNRWITFCQSIISTLTGGGGSGGGGSGGGGSGGGGSGGGGSGGGGSSGGPGPAGLYAQPGSEVQLVESGGGLVQPGGSLRLSCAASGFTFSSYTLAWVRQAPGKCLEWVAAIDSSSYTYSPDTVRGRFTISRDNAKNSLYLQMNSLRAEDTAVYYCARDSNWDALDYWGQGTTVTVSSGGGGSGGGGSGGGGSDIQMTQSPSSLSASVGDRVTITCKAREKLWSAVAWYQQKPGKAPKSLIYSASFRYSGVPSRFSGSGSGTDFTLTISSLQPEDFATYYCQQYYTYPYTFGCGTKVEIK

SEQ ID NO: 311 - protein, 811 aa, Artificial Sequence
  source: /note="Description of Artificial Sequence: Synthetic polypeptide"
APTSSSTKKTQLQLEHLLLDLQMILNGINNYKNPKLTRMLTFKFYMPKKATELKHLQCLEEELKPLEEVLNLAQSKNFHLRPRDLISNINVIVLELKGSETTFMCEYADETATIVEFLNRWITFCQSIISTLTSGGPGPAGLYAQPGSGGGGSGGGGSGGGGSGGGGSGGGGSGGGGSELCDDDPPEIPHATFKAMAYKEGTMLNCECKRGFRRIKSGSLYMLCTGNSSHSSWDNQCQCTSSATRNTTKQVTPQPEEQKERKTTEMQSPMQPVDQASLPGHCREPPPWENEATERIYHFVVGQMVYYQCVQGYRALHRGPAESVCKMTHGKTRWTQPQLICTGEMETSQFPGEEKPQASPEGRPESETSSLVTTTDFQIQTEMAATMETSIFTTEYQSGGPGPAGLYAQPGSEVQLVESGGGLVQPGNSLRLSCAASGFTFSKFGMSWVRQAPGKGLEWVSSISGSGRDTLYAESVKGRFTISRDNAKTTLYLQMNSLRPEDTAVYYCTIGGSLSVSSQGTLVTVSSGGGGSGGGGSGGGGSGGGGSGGGGSGGGGSSGGPGPAGLYAQPGSEVQLVESGGGLVQPGGSLRLSCAASGFTFSSYTLAWVRQAPGKCLEWVAAIDSSSYTYSPDTVRGRFTISRDNAKNSLYLQMNSLRAEDTAVYYCARDSNWDALDYWGQGTTVTVSSGGGGSGGGGSGGGGSDIQMTQSPSSLSASVGDRVTITCKAREKLWSAVAWYQQKPGKAPKSLIYSASFRYSGVPSRFSGSGSGTDFTLTISSLQPEDFATYYCQQYYTYPYTFGCGTKVEIK

SEQ ID NO: 312 - protein, 811 aa, Artificial Sequence
  source: /note="Description of Artificial Sequence: Synthetic polypeptide"
APTSSSTKKTQLQLEHLLLDLQMILNGINNYKNPKLTRMLTFKFYMPKKATELKHLQCLEEELKPLEEVLNLAQSKNFHLRPRDLISNINVIVLELKGSETTFMCEYADETATIVEFLNRWITFCQSIISTLTSGGPGPAGLYAQPGSGGGGSGGGGSGGGGSGGGGSGGGGSGGGGSELCDDDPPEIPHATFKAMAYKEGTMLNCECKRGFRRIKSGSLYMLCTGNSSHSSWDNQCQCTSSATRNTTKQVTPQPEEQKERKTTEMQSPMQPVDQASLPGHCREPPPWENEATERIYHFVVGQMVYYQCVQGYRALHRGPAESVCKMTHGKTRWTQPQLICTGEMETSQFPGEEKPQASPEGRPESETSSLVTTTDFQIQTEMAATMETSIFTTEYQSGGPGPAGLYAQPGSEVQLVESGGGLVQPGNSLRLSCAASGFTFSKFGMSWVRQAPGKGLEWVSSISGSGRDTLYAESVKGRFTISRDNAKTTLYLQMNSLRPEDTAVYYCTIGGSLSVSSQGTLVTVSSGGGGSGGGGSGGGGSGGGGSGGGGSGGGGSSGGPGPAGLYAQPGSEVQLVESGGGLVQPGGSLRLSCAASGFTFSSYTLAWVRQAPGKGLEWVAAIDSSSYTYSPDTVRGRFTISRDNAKNSLYLQMNSLRAEDTAVYYCARDSNWDALDYWGCGTTVTVSSGGGGSGGGGSGGGGSDIQMTQSPSSLSASVGDRVTITCKAREKLWSAVAWYQQKPGKCPKALIYSASFRYSGVPSRFSGSGSGTDFTLTISSLQPEDFATYYCQQYYTYPYTFGGGTKVEIK

SEQ ID NO: 313 - protein, 811 aa, Artificial Sequence
  source: /note="Description of Artificial Sequence: Synthetic polypeptide"
APTSSSTKKTQLQLEHLLLDLQMILNGINNYKNPKLTRMLTFKFYMPKKATELKHLQCLEEELKPLEEVLNLAQSKNFHLRPRDLISNINVIVLELKGSETTFMCEYADETATIVEFLNRWITFCQSIISTLTSGGPGPAGLYAQPGSGGGGSGGGGSGGGGSGGGGSGGGGSGGGGSELCDDDPPEIPHATFKAMAYKEGTMLNCECKRGFRRIKSGSLYMLCTGNSSHSSWDNQCQCTSSATRNTTKQVTPQPEEQKERKTTEMQSPMQPVDQASLPGHCREPPPWENEATERIYHFVVGQMVYYQCVQGYRALHRGPAESVCKMTHGKTRWTQPQLICTGEMETSQFPGEEKPQASPEGRPESETSSLVTTTDFQIQTEMAATMETSIFTTEYQSGGPGPAGLYAQPGSEVQLVESGGGLVQPGNSLRLSCAASGFTFSKFGMSWVRQAPGKGLEWVSSISGSGRDTLYAESVKGRFTISRDNAKTTLYLQMNSLRPEDTAVYYCTIGGSLSVSSQGTLVTVSSGGGGSGGGGSGGGGSGGGGSGGGGSGGGGSSGGPGPAGLYAQPGSEVQLVESGGGLVQPGGSLRLSCAASGFTFSSYTLAWVRQAPGKCLEWVAAIDSSSYTYSPDTVRGRFTISRDNAKNSLYLQMNSLRAEDTAVYYCARDSNWDALDYWGQGTTVTVSSGGGGSGGGGSGGGGSDIQMTQSPSSLSASVGDRVTITCKVTEKVWGNVAWYQQKPGKAPISLIYSPSLRKSGVPSRFSGSGSGTDFTLTISSLQPEDFATYYCQQYYTYPYTFGCGTKVEIK

SEQ ID NO: 314 - protein, 811 aa, Artificial Sequence
  source: /note="Description of Artificial Sequence: Synthetic polypeptide"
APTSSSTKKTQLQLEHLLLDLQMILNGINNYKNPKLTRMLTFKFYMPKKATELKHLQCLEEELKPLEEVLNLAQSKNFHLRPRDLISNINVIVLELKGSETTFMCEYADETATIVEFLNRWITFCQSIISTLTSGGPGPAGLYAQPGSGGGGSGGGGSGGGGSGGGGSGGGGSGGGGSELCDDDPPEIPHATFKAMAYKEGTMLNCECKRGFRRIKSGSLYMLCTGNSSHSSWDNQCQCTSSATRNTTKQVTPQPEEQKERKTTEMQSPMQPVDQASLPGHCREPPPWENEATERIYHFVVGQMVYYQCVQGYRALHRGPAESVCKMTHGKTRWTQPQLICTGEMETSQFPGEEKPQASPEGRPESETSSLVTTTDFQIQTEMAATMETSIFTTEYQSGGPGPAGLYAQPGSEVQLVESGGGLVQPGNSLRLSCAASGFTFSKFGMSWVRQAPGKGLEWVSSISGSGRDTLYAESVKGRFTISRDNAKTTLYLQMNSLRPEDTAVYYCTIGGSLSVSSQGTLVTVSSGGGGSGGGGSGGGGSGGGGSGGGGSGGGGSSGGPGPAGLYAQPGSEVQLVESGGGLVQPGGSLRLSCAASGFTFSSYTLAWVRQAPGKGLEWVAAIDSSSYTYSPDTVRGRFTISRDNAKNSLYLQMNSLRAEDTAVYYCARDSNWDALDYWGCGTTVTVSSGGGGSGGGGSGGGGSDIQMTQSPSSLSASVGDRVTITCKVTEKVWGNVAWYQQKPGKCPISLIYSPSLRKSGVPSRFSGSGSGTDFTLTISSLQPEDFATYYCQQYYTYPYTFGGGTKVEIK

SEQ ID NO: 315 - protein, 691 aa, Artificial Sequence
  source: /note="Description of Artificial Sequence: Synthetic polypeptide"
APTSSSTKKTQLQLEHLLLDLQMILNGINNYKNPKLTRMLTFKFYMPKKATELKHLQCLEEELKPLEEVLNLAQSKNFHLRPRDLISNINVIVLELKGSETTFMCEYADETATIVEFLNRWITFCQSIISTLTSGGPGPAGLYAQPGSGGGGSGGGGSGGGGSGGGGSGGGGSGGGGSELCDDDPPEIPHATFKAMAYKEGTMLNCECKRGFRRIKSGSLYMLCTGNSSHSSWDNQCQCTSSATRNTTKQVTPQPEEQKERKTTEMQSPMQPVDQASLPGHCREPPPWENEATERIYHFVVGQMVYYQCVQGYRALHRGPAESVCKMTHGKTRWTQPQLICTGEMETSQFPGEEKPQASPEGRPESETSSLVTTTDFQIQTEMAATMETSIFTTEYQSGGPGPAGLYAQPGSEVQLVESGGGLVQPGNSLRLSCAASGFTFSKFGMSWVRQAPGKGLEWVSSISGSGRDTLYAESVKGRFTISRDNAKTTLYLQMNSLRPEDTAVYYCTIGGSLSVSSQGTLVTVSSGGGGSGGGGSGGGGSGGGGSGGGGSGGGGSSGGPGPAGLYAQPGSEVQLLESGGGLVQPGGSLRLSCAASGSIFSANAMGWYRQAPGKQRELVAVISSGGSTNYADSVKGRFTISRDNSKNTVYLQMNSLRAEDTAVYYCMYSGSYYYTPNDYWGQGTLVTVSS

SEQ ID NO: 316 - protein, 691 aa, Artificial Sequence
  source: /note="Description of Artificial Sequence: Synthetic polypeptide"
APTSSSTKKTQLQLEHLLLDLQMILNGINNYKNPKLTRMLTFKFYMPKKATELKHLQCLEEELKPLEEVLNLAQSKNFHLRPRDLISNINVIVLELKGSETTFMCEYADETATIVEFLNRWITFCQSIISTLTSGGPGPAGLYAQPGSGGGGSGGGGSGGGGSGGGGSGGGGSGGGGSELCDDDPPEIPHATFKAMAYKEGTMLNCECKRGFRRIKSGSLYMLCTGNSSHSSWDNQCQCTSSATRNTTKQVTPQPEEQKERKTTEMQSPMQPVDQASLPGHCREPPPWENEATERIYHFVVGQMVYYQCVQGYRALHRGPAESVCKMTHGKTRWTQPQLICTGEMETSQFPGEEKPQASPEGRPESETSSLVTTTDFQIQTEMAATMETSIFTTEYQSGGPGPAGLYAQPGSEVQLVESGGGLVQPGNSLRLSCAASGFTFSKFGMSWVRQAPGKGLEWVSSISGSGRDTLYAESVKGRFTISRDNAKTTLYLQMNSLRPEDTAVYYCTIGGSLSVSSQGTLVTVSSGGGGSGGGGSGGGGSGGGGSGGGGSGGGGSSGGPGPAGLYAQPGSEVQLLESGGGLVQPGGSLRLSCAASGSIFSANAMGWYRQAPGKGLELVAVISSGGSTNYADSVKGRFTISRDNSKNTVYLQMNSLRAEDTAVYYCMYSGSYYYTPNDYWGQGTLVTVSS

SEQ ID NO: 317 - protein, 792 aa, Artificial Sequence
  source: /note="Description of Artificial Sequence: Synthetic polypeptide"
APTSSSTKKTQLQLEHLLLDLQMILNGINNYKNPKLTRMLTFKFYMPKKATELKHLQCLEEELKPLEEVLNLAQSKNFHLRPRDLISNINVIVLELKGSETTFMCEYADETATIVEFLNRWITFCQSIISTLTSGGPGPAGLYAQPGSGGGGSGGGGSGGGGSGGGGSGGGGSGGGGSELCDDDPPEIPHATFKAMAYKEGTMLNCECKRGFRRIKSGSLYMLCTGNSSHSSWDNQCQCTSSATRNTTKQVTPQPEEQKERKTTEMQSPMQPVDQASLPGHCREPPPWENEATERIYHFVVGQMVYYQCVQGYRALHRGPAESVCKMTHGKTRWTQPQLICTGEMETSQFPGEEKPQASPEGRPESETSSLVTTTDFQIQTEMAATMETSIFTTEYQSGGPGPAGLYAQPGSEVQLVESGGGLVQPGNSLRLSCAASGFTFSKFGMSWVRQAPGKGLEWVSSISGSGRDTLYAESVKGRFTISRDNAKTTLYLQMNSLRPEDTAVYYCTIGGSLSVSSQGTLVTVSSGGGGSGGGGSGGGGSGGGGSGGGGSGGGGSSGGPGPAGLYAQPGSEVQLVESGGGLVQPGGSLRLSCAASGFTFSSYTLAWVRQAPGKGLEWVAAIDSSSYTYSPDTVRGRFTISRDNAKNSLYLQMNSLRAEDTAVYYCARDSNWDALDYWGQGTTVTVSSASTKGPSVFPLAPSSKSTSGGTAALGCLVKDYFPEPVTVSWNSGALTSGVHTFPAVLQSSGLYSLSSVVTVPSSSLGTQTYICNVNHKPSNTKVDKRVEPKSC

SEQ ID NO: 318 - protein, 676 aa, Artificial Sequence
  source: /note="Description of Artificial Sequence: Synthetic polypeptide"
EVQLVESGGGLVQPGGSLRLSCAASGFTFSSYTLAWVRQAPGKCLEWVAAIDSSSYTYSPDTVRGRFTISRDNAKNSLYLQMNSLRAEDTAVYYCARDSNWDALDYWGQGTTVTVSSGGGGSGGGGSGGGGSDIQMTQSPSSLSASVGDRVTITCKAREKLWSAVAWYQQKPGKAPKSLIYSASFRYSGVPSRFSGSGSGTDFTLTISSLQPEDFATYYCQQYYTYPYTFGCGTKVEIKSGGPGPAGLYAQPGSGGGGSGGGGSGGGGSGGGGSGGGGSGGGGSEVQLVESGGGLVQPGNSLRLSCAASGFTFSKFGMSWVRQAPGKGLEWVSSISGSGRDTLYAESVKGRFTISRDNAKTTLYLQMNSLRPEDTAVYYCTIGGSLSVSSQGTLVTVSSSGGPGPAGLYAQPGSTFKFYMPKKATELKHLQCLEEELKPLEEVLNLAQSKNFHLRPRDLISNINVIVLELKGSETTFMCEYADETATIVEFLNRWITFCQSIISTLTGGSSSTKKTQLQLEHLLLDLQMILNGINNYKNPKLTRMLSGGPGPAGLYAQPGSEVQLVESGGGLVQPGNSLRLSCAASGFTFSKFGMSWVRQAPGKGLEWVSSISGSGRDTLYAESVKGRFTISRDNAKTTLYLQMNSLRPEDTAVYYCTIGGSLSVSSQGTLVTVSS

SEQ ID NO: 319 - protein, 676 aa, Artificial Sequence
  source: /note="Description of Artificial Sequence: Synthetic polypeptide"
EVQLVESGGGLVQPGGSLRLSCAASGFTFSSYTLAWVRQAPGKGLEWVAAIDSSSYTYSPDTVRGRFTISRDNAKNSLYLQMNSLRAEDTAVYYCARDSNWDALDYWGCGTTVTVSSGGGGSGGGGSGGGGSDIQMTQSPSSLSASVGDRVTITCKAREKLWSAVAWYQQKPGKCPKALIYSASFRYSGVPSRFSGSGSGTDFTLTISSLQPEDFATYYCQQYYTYPYTFGGGTKVEIKSGGPGPAGLYAQPGSGGGGSGGGGSGGGGSGGGGSGGGGSGGGGSEVQLVESGGGLVQPGNSLRLSCAASGFTFSKFGMSWVRQAPGKGLEWVSSISGSGRDTLYAESVKGRFTISRDNAKTTLYLQMNSLRPEDTAVYYCTIGGSLSVSSQGTLVTVSSSGGPGPAGLYAQPGSTFKFYMPKKATELKHLQCLEEELKPLEEVLNLAQSKNFHLRPRDLISNINVIVLELKGSETTFMCEYADETATIVEFLNRWITFCQSIISTLTGGSSSTKKTQLQLEHLLLDLQMILNGINNYKNPKLTRMLSGGPGPAGLYAQPGSEVQLVESGGGLVQPGNSLRLSCAASGFTFSKFGMSWVRQAPGKGLEWVSSISGSGRDTLYAESVKGRFTISRDNAKTTLYLQMNSLRPEDTAVYYCTIGGSLSVSSQGTLVTVSS

SEQ ID NO: 320 - protein, 676 aa, Artificial Sequence
  source: /note="Description of Artificial Sequence: Synthetic polypeptide"
EVQLVESGGGLVQPGGSLRLSCAASGFTFSSYTLAWVRQAPGKCLEWVAAIDSSSYTYSPDTVRGRFTISRDNAKNSLYLQMNSLRAEDTAVYYCARDSNWDALDYWGQGTTVTVSSGGGGSGGGGSGGGGSDIQMTQSPSSLSASVGDRVTITCKVTEKVWGNVAWYQQKPGKAPISLIYSPSLRKSGVPSRFSGSGSGTDFTLTISSLQPEDFATYYCQQYYTYPYTFGCGTKVEIKSGGPGPAGLYAQPGSGGGGSGGGGSGGGGSGGGGSGGGGSGGGGSEVQLVESGGGLVQPGNSLRLSCAASGFTFSKFGMSWVRQAPGKGLEWVSSISGSGRDTLYAESVKGRFTISRDNAKTTLYLQMNSLRPEDTAVYYCTIGGSLSVSSQGTLVTVSSSGGPGPAGLYAQPGSTFKFYMPKKATELKHLQCLEEELKPLEEVLNLAQSKNFHLRPRDLISNINVIVLELKGSETTFMCEYADETATIVEFLNRWITFCQSIISTLTGGSSSTKKTQLQLEHLLLDLQMILNGINNYKNPKLTRMLSGGPGPAGLYAQPGSEVQLVESGGGLVQPGNSLRLSCAASGFTFSKFGMSWVRQAPGKGLEWVSSISGSGRDTLYAESVKGRFTISRDNAKTTLYLQMNSLRPEDTAVYYCTIGGSLSVSSQGTLVTVSS

SEQ ID NO: 321 - protein, 676 aa, Artificial Sequence
  source: /note="Description of Artificial Sequence: Synthetic polypeptide"
EVQLVESGGGLVQPGGSLRLSCAASGFTFSSYTLAWVRQAPGKGLEWVAAIDSSSYTYSPDTVRGRFTISRDNAKNSLYLQMNSLRAEDTAVYYCARDSNWDALDYWGCGTTVTVSSGGGGSGGGGSGGGGSDIQMTQSPSSLSASVGDRVTITCKVTEKVWGNVAWYQQKPGKCPISLIYSPSLRKSGVPSRFSGSGSGTDFTLTISSLQPEDFATYYCQQYYTYPYTFGGGTKVEIKSGGPGPAGLYAQPGSGGGGSGGGGSGGGGSGGGGSGGGGSGGGGSEVQLVESGGGLVQPGNSLRLSCAASGFTFSKFGMSWVRQAPGKGLEWVSSISGSGRDTLYAESVKGRFTISRDNAKTTLYLQMNSLRPEDTAVYYCTIGGSLSVSSQGTLVTVSSSGGPGPAGLYAQPGSTFKFYMPKKATELKHLQCLEEELKPLEEVLNLAQSKNFHLRPRDLISNINVIVLELKGSETTFMCEYADETATIVEFLNRWITFCQSIISTLTGGSSSTKKTQLQLEHLLLDLQMILNGINNYKNPKLTRMLSGGPGPAGLYAQPGSEVQLVESGGGLVQPGNSLRLSCAASGFTFSKFGMSWVRQAPGKGLEWVSSISGSGRDTLYAESVKGRFTISRDNAKTTLYLQMNSLRPEDTAVYYCTIGGSLSVSSQGTLVTVSS

SEQ ID NO: 322 - protein, 556 aa, Artificial Sequence
  source: /note="Description of Artificial Sequence: Synthetic polypeptide"
EVQLLESGGGLVQPGGSLRLSCAASGSIFSANAMGWYRQAPGKQRELVAVISSGGSTNYADSVKGRFTISRDNSKNTVYLQMNSLRAEDTAVYYCMYSGSYYYTPNDYWGQGTLVTVSSSGGPGPAGLYAQPGSGGGGSGGGGSGGGGSGGGGSGGGGSGGGGSEVQLVESGGGLVQPGNSLRLSCAASGFTFSKFGMSWVRQAPGKGLEWVSSISGSGRDTLYAESVKGRFTISRDNAKTTLYLQMNSLRPEDTAVYYCTIGGSLSVSSQGTLVTVSSSGGPGPAGLYAQPGSTFKFYMPKKATELKHLQCLEEELKPLEEVLNLAQSKNFHLRPRDLISNINVIVLELKGSETTFMCEYADETATIVEFLNRWITFCQSIISTLTGGSSSTKKTQLQLEHLLLDLQMILNGINNYKNPKLTRMLSGGPGPAGLYAQPGSEVQLVESGGGLVQPGNSLRLSCAASGFTFSKFGMSWVRQAPGKGLEWVSSISGSGRDTLYAESVKGRFTISRDNAKTTLYLQMNSLRPEDTAVYYCTIGGSLSVSSQGTLVTVSS

SEQ ID NO: 323 - protein, 556 aa, Artificial Sequence
  source: /note="Description of Artificial Sequence: Synthetic polypeptide"
EVQLLESGGGLVQPGGSLRLSCAASGSIFSANAMGWYRQAPGKGLELVAVISSGGSTNYADSVKGRFTISRDNSKNTVYLQMNSLRAEDTAVYYCMYSGSYYYTPNDYWGQGTLVTVSSSGGPGPAGLYAQPGSGGGGSGGGGSGGGGSGGGGSGGGGSGGGGSEVQLVESGGGLVQPGNSLRLSCAASGFTFSKFGMSWVRQAPGKGLEWVSSISGSGRDTLYAESVKGRFTISRDNAKTTLYLQMNSLRPEDTAVYYCTIGGSLSVSSQGTLVTVSSSGGPGPAGLYAQPGSTFKFYMPKKATELKHLQCLEEELKPLEEVLNLAQSKNFHLRPRDLISNINVIVLELKGSETTFMCEYADETATIVEFLNRWITFCQSIISTLTGGSSSTKKTQLQLEHLLLDLQMILNGINNYKNPKLTRMLSGGPGPAGLYAQPGSEVQLVESGGGLVQPGNSLRLSCAASGFTFSKFGMSWVRQAPGKGLEWVSSISGSGRDTLYAESVKGRFTISRDNAKTTLYLQMNSLRPEDTAVYYCTIGGSLSVSSQGTLVTVSS

SEQ ID NO: 324 - protein, 657 aa, Artificial Sequence
  source: /note="Description of Artificial Sequence: Synthetic polypeptide"
EVQLVESGGGLVQPGGSLRLSCAASGFTFSSYTLAWVRQAPGKGLEWVAAIDSSSYTYSPDTVRGRFTISRDNAKNSLYLQMNSLRAEDTAVYYCARDSNWDALDYWGQGTTVTVSSASTKGPSVFPLAPSSKSTSGGTAALGCLVKDYFPEPVTVSWNSGALTSGVHTFPAVLQSSGLYSLSSVVTVPSSSLGTQTYICNVNHKPSNTKVDKRVEPKSCSGGPGPAGLYAQPGSGGGGSGGGGSGGGGSGGGGSGGGGSGGGGSEVQLVESGGGLVQPGNSLRLSCAASGFTFSKFGMSWVRQAPGKGLEWVSSISGSGRDTLYAESVKGRFTISRDNAKTTLYLQMNSLRPEDTAVYYCTIGGSLSVSSQGTLVTVSSSGGPGPAGLYAQPGSTFKFYMPKKATELKHLQCLEEELKPLEEVLNLAQSKNFHLRPRDLISNINVIVLELKGSETTFMCEYADETATIVEFLNRWITFCQSIISTLTGGSSSTKKTQLQLEHLLLDLQMILNGINNYKNPKLTRMLSGGPGPAGLYAQPGSEVQLVESGGGLVQPGNSLRLSCAASGFTFSKFGMSWVRQAPGKGLEWVSSISGSGRDTLYAESVKGRFTISRDNAKTTLYLQMNSLRPEDTAVYYCTIGGSLSVSSQGTLVTVSS

SEQ ID NO: 325 - protein, 640 aa, Artificial Sequence
  source: /note="Description of Artificial Sequence: Synthetic polypeptide"
VPRDCGCKPCICTVPEVSSVFIFPPKPKDVLTITLTPKVTCVVVDISKDDPEVQFSWFVDDVEVHTAQTQPREEQFNSTFRSVSELPIMHQDWLNGKEFKCRVNSAAFPAPIEKTISKTKGRPKAPQVYTIPPPKEQMAKDKVSLTCMITDFFPEDITVEWQWNGQPAENYKNTQPIMDTDGSYFVYSKLNVQKSNWEAGNTFTCSVLHEGLHNHHTEKSLSHSPGKSGGPGPAGLYAQPGSAPTSSSTKKTQLQLEHLLLDLQMILNGINNYKNPKLTRMLTFKFYMPKKATELKHLQCLEEELKPLEEVLNLAQSKNFHLRPRDLISNINVIVLELKGSETTFMCEYADETATIVEFLNRWITFCQSIISTLTGGGGSGGGGSGGGGSGGGGSGGGGSGGGGSSGGPGPAGLYAQPGSEVQLVESGGGLVQPGGSLRLSCAASGFTFSSYTLAWVRQAPGKGLEWVAAIDSSSYTYSPDTVRGRFTISRDNAKNSLYLQMNSLRAEDTAVYYCARDSNWDALDYWGQGTTVTVSSASTKGPSVFPLAPSSKSTSGGTAALGCLVKDYFPEPVTVSWNSGALTSGVHTFPAVLQSSGLYSLSSVVTVPSSSLGTQTYICNVNHKPSNTKVDKRVEPKSC

SEQ ID NO: 326 - protein, 659 aa, Artificial Sequence
  source: /note="Description of Artificial Sequence: Synthetic polypeptide"
VPRDCGCKPCICTVPEVSSVFIFPPKPKDVLTITLTPKVTCVVVDISKDDPEVQFSWFVDDVEVHTAQTQPREEQFNSTFRSVSELPIMHQDWLNGKEFKCRVNSAAFPAPIEKTISKTKGRPKAPQVYTIPPPKEQMAKDKVSLTCMITDFFPEDITVEWQWNGQPAENYKNTQPIMDTDGSYFVYSKLNVQKSNWEAGNTFTCSVLHEGLHNHHTEKSLSHSPGKSGGPGPAGLYAQPGSAPTSSSTKKTQLQLEHLLLDLQMILNGINNYKNPKLTRMLTFKFYMPKKATELKHLQCLEEELKPLEEVLNLAQSKNFHLRPRDLISNINVIVLELKGSETTFMCEYADETATIVEFLNRWITFCQSIISTLTGGGGSGGGGSGGGGSGGGGSGGGGSGGGGSSGGPGPAGLYAQPGSEVQLVESGGGLVQPGGSLRLSCAASGFTFSSYTLAWVRQAPGKCLEWVAAIDSSSYTYSPDTVRGRFTISRDNAKNSLYLQMNSLRAEDTAVYYCARDSNWDALDYWGQGTTVTVSSGGGGSGGGGSGGGGSDIQMTQSPSSLSASVGDRVTITCKAREKLWSAVAWYQQKPGKAPKALIYSASFRYSGVPSRFSGSGSGTDFTLTISSLQPEDFATYYCQQYYTYPYTFGCGTKVEIK

SEQ ID NO: 327 - protein, 659 aa, Artificial Sequence
  source: /note="Description of Artificial Sequence: Synthetic polypeptide"
VPRDCGCKPCICTVPEVSSVFIFPPKPKDVLTITLTPKVTCVVVDISKDDPEVQFSWFVDDVEVHTAQTQPREEQFNSTFRSVSELPIMHQDWLNGKEFKCRVNSAAFPAPIEKTISKTKGRPKAPQVYTIPPPKEQMAKDKVSLTCMITDFFPEDITVEWQWNGQPAENYKNTQPIMDTDGSYFVYSKLNVQKSNWEAGNTFTCSVLHEGLHNHHTEKSLSHSPGKSGGPGPAGLYAQPGSAPTSSSTKKTQLQLEHLLLDLQMILNGINNYKNPKLTRMLTFKFYMPKKATELKHLQCLEEELKPLEEVLNLAQSKNFHLRPRDLISNINVIVLELKGSETTFMCEYADETATIVEFLNRWITFCQSIISTLTGGGGSGGGGSGGGGSGGGGSGGGGSGGGGSSGGPGPAGLYAQPGSEVQLVESGGGLVQPGGSLRLSCAASGFTFSSYTLAWVRQAPGKCLEWVAAIDSSSYTYSPDTVRGRFTISRDNAKNSLYLQMNSLRAEDTAVYYCARDSNWDALDYWGQGTTVTVSSGGGGSGGGGSGGGGSDIQMTQSPSSLSASVGDRVTITCKAREKLWSAVAWYQQKPGKAPKSLIYSASFRYSGVPSRFSGSGSGTDFTLTISSLQPEDFATYYCQQYYTYPYTFGCGTKVEIK

SEQ ID NO: 328 - protein, 659 aa, Artificial Sequence
  source: /note="Description of Artificial Sequence: Synthetic polypeptide"
VPRDCGCKPCICTVPEVSSVFIFPPKPKDVLTITLTPKVTCVVVDISKDDPEVQFSWFVDDVEVHTAQTQPREEQFNSTFRSVSELPIMHQDWLNGKEFKCRVNSAAFPAPIEKTISKTKGRPKAPQVYTIPPPKEQMAKDKVSLTCMITDFFPEDITVEWQWNGQPAENYKNTQPIMDTDGSYFVYSKLNVQKSNWEAGNTFTCSVLHEGLHNHHTEKSLSHSPGKSGGPGPAGLYAQPGSAPTSSSTKKTQLQLEHLLLDLQMILNGINNYKNPKLTRMLTFKFYMPKKATELKHLQCLEEELKPLEEVLNLAQSKNFHLRPRDLISNINVIVLELKGSETTFMCEYADETATIVEFLNRWITFCQSIISTLTGGGGSGGGGSGGGGSGGGGSGGGGSGGGGSSGGPGPAGLYAQPGSEVQLVESGGGLVQPGGSLRLSCAASGFTFSSYTLAWVRQAPGKGLEWVAAIDSSSYTYSPDTVRGRFTISRDNAKNSLYLQMNSLRAEDTAVYYCARDSNWDALDYWGCGTTVTVSSGGGGSGGGGSGGGGSDIQMTQSPSSLSASVGDRVTITCKAREKLWSAVAWYQQKPGKCPKALIYSASFRYSGVPSRFSGSGSGTDFTLTISSLQPEDFATYYCQQYYTYPYTFGGGTKVEIK

SEQ ID NO: 329 - protein, 659 aa, Artificial Sequence
  source: /note="Description of Artificial Sequence: Synthetic polypeptide"
VPRDCGCKPCICTVPEVSSVFIFPPKPKDVLTITLTPKVTCVVVDISKDDPEVQFSWFVDDVEVHTAQTQPREEQFNSTFRSVSELPIMHQDWLNGKEFKCRVNSAAFPAPIEKTISKTKGRPKAPQVYTIPPPKEQMAKDKVSLTCMITDFFPEDITVEWQWNGQPAENYKNTQPIMDTDGSYFVYSKLNVQKSNWEAGNTFTCSVLHEGLHNHHTEKSLSHSPGKSGGPGPAGLYAQPGSAPTSSSTKKTQLQLEHLLLDLQMILNGINNYKNPKLTRMLTFKFYMPKKATELKHLQCLEEELKPLEEVLNLAQSKNFHLRPRDLISNINVIVLELKGSETTFMCEYADETATIVEFLNRWITFCQSIISTLTGGGGSGGGGSGGGGSGGGGSGGGGSGGGGSSGGPGPAGLYAQPGSEVQLVESGGGLVQPGGSLRLSCAASGFTFSSYTLAWVRQAPGKCLEWVAAIDSSSYTYSPDTVRGRFTISRDNAKNSLYLQMNSLRAEDTAVYYCARDSNWDALDYWGQGTTVTVSSGGGGSGGGGSGGGGSDIQMTQSPSSLSASVGDRVTITCKVTEKVWGNVAWYQQKPGKAPISLIYSPSLRKSGVPSRFSGSGSGTDFTLTISSLQPEDFATYYCQQYYTYPYTFGCGTKVEIK

SEQ ID NO: 330 - protein, 659 aa, Artificial Sequence
  source: /note="Description of Artificial Sequence: Synthetic polypeptide"
VPRDCGCKPCICTVPEVSSVFIFPPKPKDVLTITLTPKVTCVVVDISKDDPEVQFSWFVDDVEVHTAQTQPREEQFNSTFRSVSELPIMHQDWLNGKEFKCRVNSAAFPAPIEKTISKTKGRPKAPQVYTIPPPKEQMAKDKVSLTCMITDFFPEDITVEWQWNGQPAENYKNTQPIMDTDGSYFVYSKLNVQKSNWEAGNTFTCSVLHEGLHNHHTEKSLSHSPGKSGGPGPAGLYAQPGSAPTSSSTKKTQLQLEHLLLDLQMILNGINNYKNPKLTRMLTFKFYMPKKATELKHLQCLEEELKPLEEVLNLAQSKNFHLRPRDLISNINVIVLELKGSETTFMCEYADETATIVEFLNRWITFCQSIISTLTGGGGSGGGGSGGGGSGGGGSGGGGSGGGGSSGGPGPAGLYAQPGSEVQLVESGGGLVQPGGSLRLSCAASGFTFSSYTLAWVRQAPGKGLEWVAAIDSSSYTYSPDTVRGRFTISRDNAKNSLYLQMNSLRAEDTAVYYCARDSNWDALDYWGCGTTVTVSSGGGGSGGGGSGGGGSDIQMTQSPSSLSASVGDRVTITCKVTEKVWGNVAWYQQKPGKCPISLIYSPSLRKSGVPSRFSGSGSGTDFTLTISSLQPEDFATYYCQQYYTYPYTFGGGTKVEIK

SEQ ID NO: 331 - protein, 539 aa, Artificial Sequence
  source: /note="Description of Artificial Sequence: Synthetic polypeptide"
VPRDCGCKPCICTVPEVSSVFIFPPKPKDVLTITLTPKVTCVVVDISKDDPEVQFSWFVDDVEVHTAQTQPREEQFNSTFRSVSELPIMHQDWLNGKEFKCRVNSAAFPAPIEKTISKTKGRPKAPQVYTIPPPKEQMAKDKVSLTCMITDFFPEDITVEWQWNGQPAENYKNTQPIMDTDGSYFVYSKLNVQKSNWEAGNTFTCSVLHEGLHNHHTEKSLSHSPGKSGGPGPAGLYAQPGSAPTSSSTKKTQLQLEHLLLDLQMILNGINNYKNPKLTRMLTFKFYMPKKATELKHLQCLEEELKPLEEVLNLAQSKNFHLRPRDLISNINVIVLELKGSETTFMCEYADETATIVEFLNRWITFCQSIISTLTGGGGSGGGGSGGGGSGGGGSGGGGSGGGGSSGGPGPAGLYAQPGSEVQLLESGGGLVQPGGSLRLSCAASGSIFSANAMGWYRQAPGKQRELVAVISSGGSTNYADSVKGRFTISRDNSKNTVYLQMNSLRAEDTAVYYCMYSGSYYYTPNDYWGQGTLVTVSS

SEQ ID NO: 332 - protein, 463 aa, Artificial Sequence
  source: /note="Description of Artificial Sequence: Synthetic polypeptide"
ELCDDDPPEIPHATFKAMAYKEGTMLNCECKRGFRRIKSGSLYMLCTGNSSHSSWDNQCQCTSSATRNTTKQVTPQPEEQKERKTTEMQSPMQPVDQASLPGHCREPPPWENEATERIYHFVVGQMVYYQCVQGYRALHRGPAESVCKMTHGKTRWTQPQLICTGEMETSQFPGEEKPQASPEGRPESETSSLVTTTDFQIQTEMAATMETSIFTTEYQGGGGSGGGGSGGGGSGGGGSGGGGSGGGGSDIQMTQSPSSLSASVGDRVTITCKAREKLWSAVAWYQQKPGKAPKSLIYSASFRYSGVPSRFSGSGSGTDFTLTISSLQPEDFATYYCQQYYTYPYTFGGGTKVEIKRTVAAPSVFIFPPSDEQLKSGTASVVCLLNNFYPREAKVQWKVDNALQSGNSQESVTEQDSKDSTYSLSSTLTLSKADYEKHKVYACEVTHQGLSSPVTKSFNRGEC

SEQ ID NO: 333 - protein, 463 aa, Artificial Sequence
  source: /note="Description of Artificial Sequence: Synthetic polypeptide"
ELCDDDPPEIPHATFKAMAYKEGTMLNCECKRGFRRIKSGSLYMLCTGNSSHSSWDNQCQCTSSATRNTTKQVTPQPEEQKERKTTEMQSPMQPVDQASLPGHCREPPPWENEATERIYHFVVGQMVYYQCVQGYRALHRGPAESVCKMTHGKTRWTQPQLICTGEMETSQFPGEEKPQASPEGRPESETSSLVTTTDFQIQTEMAATMETSIFTTEYQGGGGSGGGGSGGGGSGGGGSGGGGSGGGGSDIQMTQSPSSLSASVGDRVTITCKVTEKVWGNVAWYQQKPGKAPISLIYSPSLRKSGVPSRFSGSGSGTDFTLTISSLQPEDFATYYCQQYYTYPYTFGGGTKVEIKRTVAAPSVFIFPPSDEQLKSGTASVVCLLNNFYPREAKVQWKVDNALQSGNSQESVTEQDSKDSTYSLSSTLTLSKADYEKHKVYACEVTHQGLSSPVTKSFNRGEC

SEQ ID NO: 334 - protein, 811 aa, Artificial Sequence
  source: /note="Description of Artificial Sequence: Synthetic polypeptide"
APTSSSTKKTQLQLEHLLLDLQMILNGINNYKNPKLTRMLTFKFYMPKKATELKHLQCLEEELKPLEEVLNLAQSKNFHLRPRDLISNINVIVLELKGSETTFMCEYADETATIVEFLNRWITFCQSIISTLTSGGPGPAGLYAQPGSGGGGSGGGGSGGGGSGGGGSGGGGSGGGGSEVQLVESGGGLVQPGGSLRLSCAASGFTFSSYTLAWVRQAPGKCLEWVAAIDSSSYTYSPDTVRGRFTISRDNAKNSLYLQMNSLRAEDTAVYYCARDSNWDALDYWGQGTTVTVSSGGGGSGGGGSGGGGSDIQMTQSPSSLSASVGDRVTITCKAREKLWSAVAWYQQKPGKAPKSLIYSASFRYSGVPSRFSGSGSGTDFTLTISSLQPEDFATYYCQQYYTYPYTFGCGTKVEIKGGGGSGGGGSGGGGSGGGGSGGGGSGGGGSGGGGSGGGGSGGGGSELCDDDPPEIPHATFKAMAYKEGTMLNCECKRGFRRIKSGSLYMLCTGNSSHSSWDNQCQCTSSATRNTTKQVTPQPEEQKERKTTEMQSPMQPVDQASLPGHCREPPPWENEATERIYHFVVGQMVYYQCVQGYRALHRGPAESVCKMTHGKTRWTQPQLICTGEMETSQFPGEEKPQASPEGRPESETSSLVTTTDFQIQTEMAATMETSIFTTEYQSGGPGPAGLYAQPGSEVQLVESGGGLVQPGNSLRLSCAASGFTFSKFGMSWVRQAPGKGLEWVSSISGSGRDTLYAESVKGRFTISRDNAKTTLYLQMNSLRPEDTAVYYCTIGGSLSVSSQGTLVTVSS

SEQ ID NO: 335 - protein, 811 aa, Artificial Sequence
  source: /note="Description of Artificial Sequence: Synthetic polypeptide"
APTSSSTKKTQLQLEHLLLDLQMILNGINNYKNPKLTRMLTFKFYMPKKATELKHLQCLEEELKPLEEVLNLAQSKNFHLRPRDLISNINVIVLELKGSETTFMCEYADETATIVEFLNRWITFCQSIISTLTSGGPGPAGLYAQPGSGGGGSGGGGSGGGGSGGGGSGGGGSGGGGSEVQLVESGGGLVQPGGSLRLSCAASGFTFSSYTLAWVRQAPGKGLEWVAAIDSSSYTYSPDTVRGRFTISRDNAKNSLYLQMNSLRAEDTAVYYCARDSNWDALDYWGCGTTVTVSSGGGGSGGGGSGGGGSDIQMTQSPSSLSASVGDRVTITCKAREKLWSAVAWYQQKPGKCPKALIYSASFRYSGVPSRFSGSGSGTDFTLTISSLQPEDFATYYCQQYYTYPYTFGGGTKVEIKGGGGSGGGGSGGGGSGGGGSGGGGSGGGGSGGGGSGGGGSGGGGSELCDDDPPEIPHATFKAMAYKEGTMLNCECKRGFRRIKSGSLYMLCTGNSSHSSWDNQCQCTSSATRNTTKQVTPQPEEQKERKTTEMQSPMQPVDQASLPGHCREPPPWENEATERIYHFVVGQMVYYQCVQGYRALHRGPAESVCKMTHGKTRWTQPQLICTGEMETSQFPGEEKPQASPEGRPESETSSLVTTTDFQIQTEMAATMETSIFTTEYQSGGPGPAGLYAQPGSEVQLVESGGGLVQPGNSLRLSCAASGFTFSKFGMSWVRQAPGKGLEWVSSISGSGRDTLYAESVKGRFTISRDNAKTTLYLQMNSLRPEDTAVYYCTIGGSLSVSSQGTLVTVSS

SEQ ID NO: 336 - protein, 811 aa, Artificial Sequence
  source: /note="Description of Artificial Sequence: Synthetic polypeptide"
APTSSSTKKTQLQLEHLLLDLQMILNGINNYKNPKLTRMLTFKFYMPKKATELKHLQCLEEELKPLEEVLNLAQSKNFHLRPRDLISNINVIVLELKGSETTFMCEYADETATIVEFLNRWITFCQSIISTLTSGGPGPAGLYAQPGSGGGGSGGGGSGGGGSGGGGSGGGGSGGGGSEVQLVESGGGLVQPGGSLRLSCAASGFTFSSYTLAWVRQAPGKCLEWVAAIDSSSYTYSPDTVRGRFTISRDNAKNSLYLQMNSLRAEDTAVYYCARDSNWDALDYWGQGTTVTVSSGGGGSGGGGSGGGGSDIQMTQSPSSLSASVGDRVTITCKVTEKVWGNVAWYQQKPGKAPISLIYSPSLRKSGVPSRFSGSGSGTDFTLTISSLQPEDFATYYCQQYYTYPYTFGCGTKVEIKGGGGSGGGGSGGGGSGGGGSGGGGSGGGGSGGGGSGGGGSGGGGSELCDDDPPEIPHATFKAMAYKEGTMLNCECKRGFRRIKSGSLYMLCTGNSSHSSWDNQCQCTSSATRNTTKQVTPQPEEQKERKTTEMQSPMQPVDQASLPGHCREPPPWENEATERIYHFVVGQMVYYQCVQGYRALHRGPAESVCKMTHGKTRWTQPQLICTGEMETSQFPGEEKPQASPEGRPESETSSLVTTTDFQIQTEMAATMETSIFTTEYQSGGPGPAGLYAQPGSEVQLVESGGGLVQPGNSLRLSCAASGFTFSKFGMSWVRQAPGKGLEWVSSISGSGRDTLYAESVKGRFTISRDNAKTTLYLQMNSLRPEDTAVYYCTIGGSLSVSSQGTLVTVSS

SEQ ID NO: 337 - protein, 811 aa, Artificial Sequence
  source: /note="Description of Artificial Sequence: Synthetic polypeptide"
APTSSSTKKTQLQLEHLLLDLQMILNGINNYKNPKLTRMLTFKFYMPKKATELKHLQCLEEELKPLEEVLNLAQSKNFHLRPRDLISNINVIVLELKGSETTFMCEYADETATIVEFLNRWITFCQSIISTLTSGGPGPAGLYAQPGSGGGGSGGGGSGGGGSGGGGSGGGGSGGGGSEVQLVESGGGLVQPGGSLRLSCAASGFTFSSYTLAWVRQAPGKGLEWVAAIDSSSYTYSPDTVRGRFTISRDNAKNSLYLQMNSLRAEDTAVYYCARDSNWDALDYWGCGTTVTVSSGGGGSGGGGSGGGGSDIQMTQSPSSLSASVGDRVTITCKVTEKVWGNVAWYQQKPGKCPISLIYSPSLRKSGVPSRFSGSGSGTDFTLTISSLQPEDFATYYCQQYYTYPYTFGGGTKVEIKGGGGSGGGGSGGGGSGGGGSGGGGSGGGGSGGGGSGGGGSGGGGSELCDDDPPEIPHATFKAMAYKEGTMLNCECKRGFRRIKSGSLYMLCTGNSSHSSWDNQCQCTSSATRNTTKQVTPQPEEQKERKTTEMQSPMQPVDQASLPGHCREPPPWENEATERIYHFVVGQMVYYQCVQGYRALHRGPAESVCKMTHGKTRWTQPQLICTGEMETSQFPGEEKPQASPEGRPESETSSLVTTTDFQIQTEMAATMETSIFTTEYQSGGPGPAGLYAQPGSEVQLVESGGGLVQPGNSLRLSCAASGFTFSKFGMSWVRQAPGKGLEWVSSISGSGRDTLYAESVKGRFTISRDNAKTTLYLQMNSLRPEDTAVYYCTIGGSLSVSSQGTLVTVSS

SEQ ID NO: 338 - protein, 691 aa, Artificial Sequence
  source: /note="Description of Artificial Sequence: Synthetic polypeptide"
APTSSSTKKTQLQLEHLLLDLQMILNGINNYKNPKLTRMLTFKFYMPKKATELKHLQCLEEELKPLEEVLNLAQSKNFHLRPRDLISNINVIVLELKGSETTFMCEYADETATIVEFLNRWITFCQSIISTLTSGGPGPAGLYAQPGSGGGGSGGGGSGGGGSGGGGSGGGGSGGGGSEVQLLESGGGLVQPGGSLRLSCAASGSIFSANAMGWYRQAPGKQRELVAVISSGGSTNYADSVKGRFTISRDNSKNTVYLQMNSLRAEDTAVYYCMYSGSYYYTPNDYWGQGTLVTVSSGGGGSGGGGSGGGGSGGGGSGGGGSGGGGSGGGGSGGGGSGGGGSELCDDDPPEIPHATFKAMAYKEGTMLNCECKRGFRRIKSGSLYMLCTGNSSHSSWDNQCQCTSSATRNTTKQVTPQPEEQKERKTTEMQSPMQPVDQASLPGHCREPPPWENEATERIYHFVVGQMVYYQCVQGYRALHRGPAESVCKMTHGKTRWTQPQLICTGEMETSQFPGEEKPQASPEGRPESETSSLVTTTDFQIQTEMAATMETSIFTTEYQSGGPGPAGLYAQPGSEVQLVESGGGLVQPGNSLRLSCAASGFTFSKFGMSWVRQAPGKGLEWVSSISGSGRDTLYAESVKGRFTISRDNAKTTLYLQMNSLRPEDTAVYYCTIGGSLSVSSQGTLVTVSS

SEQ ID NO: 339 - protein, 691 aa, Artificial Sequence
  source: /note="Description of Artificial Sequence: Synthetic polypeptide"
APTSSSTKKTQLQLEHLLLDLQMILNGINNYKNPKLTRMLTFKFYMPKKATELKHLQCLEEELKPLEEVLNLAQSKNFHLRPRDLISNINVIVLELKGSETTFMCEYADETATIVEFLNRWITFCQSIISTLTSGGPGPAGLYAQPGSGGGGSGGGGSGGGGSGGGGSGGGGSGGGGSEVQLLESGGGLVQPGGSLRLSCAASGSIFSANAMGWYRQAPGKGLELVAVISSGGSTNYADSVKGRFTISRDNSKNTVYLQMNSLRAEDTAVYYCMYSGSYYYTPNDYWGQGTLVTVSSGGGGSGGGGSGGGGSGGGGSGGGGSGGGGSGGGGSGGGGSGGGGSELCDDDPPEIPHATFKAMAYKEGTMLNCECKRGFRRIKSGSLYMLCTGNSSHSSWDNQCQCTSSATRNTTKQVTPQPEEQKERKTTEMQSPMQPVDQASLPGHCREPPPWENEATERIYHFVVGQMVYYQCVQGYRALHRGPAESVCKMTHGKTRWTQPQLICTGEMETSQFPGEEKPQASPEGRPESETSSLVTTTDFQIQTEMAATMETSIFTTEYQSGGPGPAGLYAQPGSEVQLVESGGGLVQPGNSLRLSCAASGFTFSKFGMSWVRQAPGKGLEWVSSISGSGRDTLYAESVKGRFTISRDNAKTTLYLQMNSLRPEDTAVYYCTIGGSLSVSSQGTLVTVSS

SEQ ID NO: 340 - protein, 811 aa, Artificial Sequence
  source: /note="Description of Artificial Sequence: Synthetic polypeptide"
EVQLVESGGGLVQPGNSLRLSCAASGFTFSKFGMSWVRQAPGKGLEWVSSISGSGRDTLYAESVKGRFTISRDNAKTTLYLQMNSLRPEDTAVYYCTIGGSLSVSSQGTLVTVSSSGGPGPAGLYAQPGSEVQLVESGGGLVQPGGSLRLSCAASGFTFSSYTLAWVRQAPGKCLEWVAAIDSSSYTYSPDTVRGRFTISRDNAKNSLYLQMNSLRAEDTAVYYCARDSNWDALDYWGQGTTVTVSSGGGGSGGGGSGGGGSDIQMTQSPSSLSASVGDRVTITCKAREKLWSAVAWYQQKPGKAPKSLIYSASFRYSGVPSRFSGSGSGTDFTLTISSLQPEDFATYYCQQYYTYPYTFGCGTKVEIKGGGGSGGGGSGGGGSGGGGSGGGGSGGGGSGGGGSGGGGSGGGGSELCDDDPPEIPHATFKAMAYKEGTMLNCECKRGFRRIKSGSLYMLCTGNSSHSSWDNQCQCTSSATRNTTKQVTPQPEEQKERKTTEMQSPMQPVDQASLPGHCREPPPWENEATERIYHFVVGQMVYYQCVQGYRALHRGPAESVCKMTHGKTRWTQPQLICTGEMETSQFPGEEKPQASPEGRPESETSSLVTTTDFQIQTEMAATMETSIFTTEYQGGGGSGGGGSGGGGSGGGGSGGGGSGGGGSSGGPGPAGLYAQPGSAPTSSSTKKTQLQLEHLLLDLQMILNGINNYKNPKLTRMLTFKFYMPKKATELKHLQCLEEELKPLEEVLNLAQSKNFHLRPRDLISNINVIVLELKGSETTFMCEYADETATIVEFLNRWITFCQSIISTLT

SEQ ID NO: 341 - protein, 811 aa, Artificial Sequence
  source: /note="Description of Artificial Sequence: Synthetic polypeptide"
EVQLVESGGGLVQPGNSLRLSCAASGFTFSKFGMSWVRQAPGKGLEWVSSISGSGRDTLYAESVKGRFTISRDNAKTTLYLQMNSLRPEDTAVYYCTIGGSLSVSSQGTLVTVSSSGGPGPAGLYAQPGSEVQLVESGGGLVQPGGSLRLSCAASGFTFSSYTLAWVRQAPGKGLEWVAAIDSSSYTYSPDTVRGRFTISRDNAKNSLYLQMNSLRAEDTAVYYCARDSNWDALDYWGCGTTVTVSSGGGGSGGGGSGGGGSDIQMTQSPSSLSASVGDRVTITCKAREKLWSAVAWYQQKPGKCPKALIYSASFRYSGVPSRFSGSGSGTDFTLTISSLQPEDFATYYCQQYYTYPYTFGGGTKVEIKGGGGSGGGGSGGGGSGGGGSGGGGSGGGGSGGGGSGGGGSGGGGSELCDDDPPEIPHATFKAMAYKEGTMLNCECKRGFRRIKSGSLYMLCTGNSSHSSWDNQCQCTSSATRNTTKQVTPQPEEQKERKTTEMQSPMQPVDQASLPGHCREPPPWENEATERIYHFVVGQMVYYQCVQGYRALHRGPAESVCKMTHGKTRWTQPQLICTGEMETSQFPGEEKPQASPEGRPESETSSLVTTTDFQIQTEMAATMETSIFTTEYQGGGGSGGGGSGGGGSGGGGSGGGGSGGGGSSGGPGPAGLYAQPGSAPTSSSTKKTQLQLEHLLLDLQMILNGINNYKNPKLTRMLTFKFYMPKKATELKHLQCLEEELKPLEEVLNLAQSKNFHLRPRDLISNINVIVLELKGSETTFMCEYADETATIVEFLNRWITFCQSIISTLT

SEQ ID NO: 342 - protein, 811 aa, Artificial Sequence
  source: /note="Description of Artificial Sequence: Synthetic polypeptide"
EVQLVESGGGLVQPGNSLRLSCAASGFTFSKFGMSWVRQAPGKGLEWVSSISGSGRDTLYAESVKGRFTISRDNAKTTLYLQMNSLRPEDTAVYYCTIGGSLSVSSQGTLVTVSSSGGPGPAGLYAQPGSEVQLVESGGGLVQPGGSLRLSCAASGFTFSSYTLAWVRQAPGKCLEWVAAIDSSSYTYSPDTVRGRFTISRDNAKNSLYLQMNSLRAEDTAVYYCARDSNWDALDYWGQGTTVTVSSGGGGSGGGGSGGGGSDIQMTQSPSSLSASVGDRVTITCKVTEKVWGNVAWYQQKPGKAPISLIYSPSLRKSGVPSRFSGSGSGTDFTLTISSLQPEDFATYYCQQYYTYPYTFGCGTKVEIKGGGGSGGGGSGGGGSGGGGSGGGGSGGGGSGGGGSGGGGSGGGGSELCDDDPPEIPHATFKAMAYKEGTMLNCECKRGFRRIKSGSLYMLCTGNSSHSSWDNQCQCTSSATRNTTKQVTPQPEEQKERKTTEMQSPMQPVDQASLPGHCREPPPWENEATERIYHFVVGQMVYYQCVQGYRALHRGPAESVCKMTHGKTRWTQPQLICTGEMETSQFPGEEKPQASPEGRPESETSSLVTTTDFQIQTEMAATMETSIFTTEYQGGGGSGGGGSGGGGSGGGGSGGGGSGGGGSSGGPGPAGLYAQPGSAPTSSSTKKTQLQLEHLLLDLQMILNGINNYKNPKLTRMLTFKFYMPKKATELKHLQCLEEELKPLEEVLNLAQSKNFHLRPRDLISNINVIVLELKGSETTFMCEYADETATIVEFLNRWITFCQSIISTLT

SEQ ID NO: 343 - protein, 811 aa, Artificial Sequence
  source: /note="Description of Artificial Sequence: Synthetic polypeptide"
EVQLVESGGGLVQPGNSLRLSCAASGFTFSKFGMSWVRQAPGKGLEWVSSISGSGRDTLYAESVKGRFTISRDNAKTTLYLQMNSLRPEDTAVYYCTIGGSLSVSSQGTLVTVSSSGGPGPAGLYAQPGSEVQLVESGGGLVQPGGSLRLSCAASGFTFSSYTLAWVRQAPGKGLEWVAAIDSSSYTYSPDTVRGRFTISRDNAKNSLYLQMNSLRAEDTAVYYCARDSNWDALDYWGCGTTVTVSSGGGGSGGGGSGGGGSDIQMTQSPSSLSASVGDRVTITCKVTEKVWGNVAWYQQKPGKCPISLIYSPSLRKSGVPSRFSGSGSGTDFTLTISSLQPEDFATYYCQQYYTYPYTFGGGTKVEIKGGGGSGGGGSGGGGSGGGGSGGGGSGGGGSGGGGSGGGGSGGGGSELCDDDPPEIPHATFKAMAYKEGTMLNCECKRGFRRIKSGSLYMLCTGNSSHSSWDNQCQCTSSATRNTTKQVTPQPEEQKERKTTEMQSPMQPVDQASLPGHCREPPPWENEATERIYHFVVGQMVYYQCVQGYRALHRGPAESVCKMTHGKTRWTQPQLICTGEMETSQFPGEEKPQASPEGRPESETSSLVTTTDFQIQTEMAATMETSIFTTEYQGGGGSGGGGSGGGGSGGGGSGGGGSGGGGSSGGPGPAGLYAQPGSAPTSSSTKKTQLQLEHLLLDLQMILNGINNYKNPKLTRMLTFKFYMPKKATELKHLQCLEEELKPLEEVLNLAQSKNFHLRPRDLISNINVIVLELKGSETTFMCEYADETATIVEFLNRWITFCQSIISTLT

SEQ ID NO: 344 - protein, 691 aa, Artificial Sequence
  source: /note="Description of Artificial Sequence: Synthetic polypeptide"
EVQLVESGGGLVQPGNSLRLSCAASGFTFSKFGMSWVRQAPGKGLEWVSSISGSGRDTLYAESVKGRFTISRDNAKTTLYLQMNSLRPEDTAVYYCTIGGSLSVSSQGTLVTVSSSGGPGPAGLYAQPGSEVQLLESGGGLVQPGGSLRLSCAASGSIFSANAMGWYRQAPGKQRELVAVISSGGSTNYADSVKGRFTISRDNSKNTVYLQMNSLRAEDTAVYYCMYSGSYYYTPNDYWGQGTLVTVSSGGGGSGGGGSGGGGSGGGGSGGGGSGGGGSGGGGSGGGGSGGGGSELCDDDPPEIPHATFKAMAYKEGTMLNCECKRGFRRIKSGSLYMLCTGNSSHSSWDNQCQCTSSATRNTTKQVTPQPEEQKERKTTEMQSPMQPVDQASLPGHCREPPPWENEATERIYHFVVGQMVYYQCVQGYRALHRGPAESVCKMTHGKTRWTQPQLICTGEMETSQFPGEEKPQASPEGRPESETSSLVTTTDFQIQTEMAATMETSIFTTEYQGGGGSGGGGSGGGGSGGGGSGGGGSGGGGSSGGPGPAGLYAQPGSAPTSSSTKKTQLQLEHLLLDLQMILNGINNYKNPKLTRMLTFKFYMPKKATELKHLQCLEEELKPLEEVLNLAQSKNFHLRPRDLISNINVIVLELKGSETTFMCEYADETATIVEFLNRWITFCQSIISTLT

SEQ ID NO: 345 - protein, 691 aa, Artificial Sequence
  source: /note="Description of Artificial Sequence: Synthetic polypeptide"
EVQLVESGGGLVQPGNSLRLSCAASGFTFSKFGMSWVRQAPGKGLEWVSSISGSGRDTLYAESVKGRFTISRDNAKTTLYLQMNSLRPEDTAVYYCTIGGSLSVSSQGTLVTVSSSGGPGPAGLYAQPGSEVQLLESGGGLVQPGGSLRLSCAASGSIFSANAMGWYRQAPGKGLELVAVISSGGSTNYADSVKGRFTISRDNSKNTVYLQMNSLRAEDTAVYYCMYSGSYYYTPNDYWGQGTLVTVSSGGGGSGGGGSGGGGSGGGGSGGGGSGGGGSGGGGSGGGGSGGGGSELCDDDPPEIPHATFKAMAYKEGTMLNCECKRGFRRIKSGSLYMLCTGNSSHSSWDNQCQCTSSATRNTTKQVTPQPEEQKERKTTEMQSPMQPVDQASLPGHCREPPPWENEATERIYHFVVGQMVYYQCVQGYRALHRGPAESVCKMTHGKTRWTQPQLICTGEMETSQFPGEEKPQASPEGRPESETSSLVTTTDFQIQTEMAATMETSIFTTEYQGGGGSGGGGSGGGGSGGGGSGGGGSGGGGSSGGPGPAGLYAQPGSAPTSSSTKKTQLQLEHLLLDLQMILNGINNYKNPKLTRMLTFKFYMPKKATELKHLQCLEEELKPLEEVLNLAQSKNFHLRPRDLISNINVIVLELKGSETTFMCEYADETATIVEFLNRWITFCQSIISTLT

SEQ ID NO: 346 - protein, 696 aa, Artificial Sequence
  source: /note="Description of Artificial Sequence: Synthetic polypeptide"
APTSSSTKKTQLQLEHLLLDLQMILNGINNYKNPKLTRMLTFKFYMPKKATELKHLQCLEEELKPLEEVLNLAQSKNFHLRPRDLISNINVIVLELKGSETTFMCEYADETATIVEFLNRWITFCQSIISTLTSGGPGPAGLYAQPGSEVQLVESGGGLVQPGNSLRLSCAASGFTFSKFGMSWVRQAPGKGLEWVSSISGSGRDTLYAESVKGRFTISRDNAKTTLYLQMNSLRPEDTAVYYCTIGGSLSVSSQGTLVTVSSGGGGSGGGGSGGGGSGGGGSGGGGSGGGGSSGGPGPAGLYAQPGSEVQLVESGGGLVQPGGSLRLSCAASGFTFSSYTLAWVRQAPGKCLEWVAAIDSSSYTYSPDTVRGRFTISRDNAKNSLYLQMNSLRAEDTAVYYCARDSNWDALDYWGQGTTVTVSSGGGGSGGGGSGGGGSDIQMTQSPSSLSASVGDRVTITCKAREKLWSAVAWYQQKPGKAPKSLIYSASFRYSGVPSRFSGSGSGTDFTLTISSLQPEDFATYYCQQYYTYPYTFGCGTKVEIKGGGGSGGGGSGGGGSGGGGSGGGGSGGGGSEVQLLESGGGLVQPGGSLRLSCAASGSIFSANAMGWYRQAPGKQRELVAVISSGGSTNYADSVKGRFTISRDNSKNTVYLQMNSLRAEDTAVYYCMYSGSYYYTPNDYWGQGTLVTVSS

SEQ ID NO: 347 - protein, 696 aa, Artificial Sequence
  source: /note="Description of Artificial Sequence: Synthetic polypeptide"
APTSSSTKKTQLQLEHLLLDLQMILNGINNYKNPKLTRMLTFKFYMPKKATELKHLQCLEEELKPLEEVLNLAQSKNFHLRPRDLISNINVIVLELKGSETTFMCEYADETATIVEFLNRWITFCQSIISTLTSGGPGPAGLYAQPGSEVQLVESGGGLVQPGNSLRLSCAASGFTFSKFGMSWVRQAPGKGLEWVSSISGSGRDTLYAESVKGRFTISRDNAKTTLYLQMNSLRPEDTAVYYCTIGGSLSVSSQGTLVTVSSGGGGSGGGGSGGGGSGGGGSGGGGSGGGGSSGGPGPAGLYAQPGSEVQLVESGGGLVQPGGSLRLSCAASGFTFSSYTLAWVRQAPGKGLEWVAAIDSSSYTYSPDTVRGRFTISRDNAKNSLYLQMNSLRAEDTAVYYCARDSNWDALDYWGCGTTVTVSSGGGGSGGGGSGGGGSDIQMTQSPSSLSASVGDRVTITCKAREKLWSAVAWYQQKPGKCPKALIYSASFRYSGVPSRFSGSGSGTDFTLTISSLQPEDFATYYCQQYYTYPYTFGGGTKVEIKGGGGSGGGGSGGGGSGGGGSGGGGSGGGGSEVQLLESGGGLVQPGGSLRLSCAASGSIFSANAMGWYRQAPGKQRELVAVISSGGSTNYADSVKGRFTISRDNSKNTVYLQMNSLRAEDTAVYYCMYSGSYYYTPNDYWGQGTLVTVSS

SEQ ID NO: 348 - protein, 696 aa, Artificial Sequence
  source: /note="Description of Artificial Sequence: Synthetic polypeptide"
APTSSSTKKTQLQLEHLLLDLQMILNGINNYKNPKLTRMLTFKFYMPKKATELKHLQCLEEELKPLEEVLNLAQSKNFHLRPRDLISNINVIVLELKGSETTFMCEYADETATIVEFLNRWITFCQSIISTLTSGGPGPAGLYAQPGSEVQLVESGGGLVQPGNSLRLSCAASGFTFSKFGMSWVRQAPGKGLEWVSSISGSGRDTLYAESVKGRFTISRDNAKTTLYLQMNSLRPEDTAVYYCTIGGSLSVSSQGTLVTVSSGGGGSGGGGSGGGGSGGGGSGGGGSGGGGSSGGPGPAGLYAQPGSEVQLVESGGGLVQPGGSLRLSCAASGFTFSSYTLAWVRQAPGKCLEWVAAIDSSSYTYSPDTVRGRFTISRDNAKNSLYLQMNSLRAEDTAVYYCARDSNWDALDYWGQGTTVTVSSGGGGSGGGGSGGGGSDIQMTQSPSSLSASVGDRVTITCKVTEKVWGNVAWYQQKPGKAPISLIYSPSLRKSGVPSRFSGSGSGTDFTLTISSLQPEDFATYYCQQYYTYPYTFGCGTKVEIKGGGGSGGGGSGGGGSGGGGSGGGGSGGGGSEVQLLESGGGLVQPGGSLRLSCAASGSIFSANAMGWYRQAPGKQRELVAVISSGGSTNYADSVKGRFTISRDNSKNTVYLQMNSLRAEDTAVYYCMYSGSYYYTPNDYWGQGTLVTVSS

SEQ ID NO: 349 - protein, 696 aa, Artificial Sequence
  source: /note="Description of Artificial Sequence: Synthetic polypeptide"
APTSSSTKKTQLQLEHLLLDLQMILNGINNYKNPKLTRMLTFKFYMPKKATELKHLQCLEEELKPLEEVLNLAQSKNFHLRPRDLISNINVIVLELKGSETTFMCEYADETATIVEFLNRWITFCQSIISTLTSGGPGPAGLYAQPGSEVQLVESGGGLVQPGNSLRLSCAASGFTFSKFGMSWVRQAPGKGLEWVSSISGSGRDTLYAESVKGRFTISRDNAKTTLYLQMNSLRPEDTAVYYCTIGGSLSVSSQGTLVTVSSGGGGSGGGGSGGGGSGGGGSGGGGSGGGGSSGGPGPAGLYAQPGSEVQLVESGGGLVQPGGSLRLSCAASGFTFSSYTLAWVRQAPGKGLEWVAAIDSSSYTYSPDTVRGRFTISRDNAKNSLYLQMNSLRAEDTAVYYCARDSNWDALDYWGCGTTVTVSSGGGGSGGGGSGGGGSDIQMTQSPSSLSASVGDRVTITCKVTEKVWGNVAWYQQKPGKCPISLIYSPSLRKSGVPSRFSGSGSGTDFTLTISSLQPEDFATYYCQQYYTYPYTFGGGTKVEIKGGGGSGGGGSGGGGSGGGGSGGGGSGGGGSEVQLLESGGGLVQPGGSLRLSCAASGSIFSANAMGWYRQAPGKQRELVAVISSGGSTNYADSVKGRFTISRDNSKNTVYLQMNSLRAEDTAVYYCMYSGSYYYTPNDYWGQGTLVTVSS

SEQ ID NO: 350 - protein, 696 aa, Artificial Sequence
  source: /note="Description of Artificial Sequence: Synthetic polypeptide"
APTSSSTKKTQLQLEHLLLDLQMILNGINNYKNPKLTRMLTFKFYMPKKATELKHLQCLEEELKPLEEVLNLAQSKNFHLRPRDLISNINVIVLELKGSETTFMCEYADETATIVEFLNRWITFCQSIISTLTSGGPGPAGLYAQPGSEVQLVESGGGLVQPGNSLRLSCAASGFTFSKFGMSWVRQAPGKGLEWVSSISGSGRDTLYAESVKGRFTISRDNAKTTLYLQMNSLRPEDTAVYYCTIGGSLSVSSQGTLVTVSSGGGGSGGGGSGGGGSGGGGSGGGGSGGGGSSGGPGPAGLYAQPGSEVQLVESGGGLVQPGGSLRLSCAASGFTFSSYTLAWVRQAPGKCLEWVAAIDSSSYTYSPDTVRGRFTISRDNAKNSLYLQMNSLRAEDTAVYYCARDSNWDALDYWGQGTTVTVSSGGGGSGGGGSGGGGSDIQMTQSPSSLSASVGDRVTITCKAREKLWSAVAWYQQKPGKAPKSLIYSASFRYSGVPSRFSGSGSGTDFTLTISSLQPEDFATYYCQQYYTYPYTFGCGTKVEIKGGGGSGGGGSGGGGSGGGGSGGGGSGGGGSEVQLLESGGGLVQPGGSLRLSCAASGSIFSANAMGWYRQAPGKGLELVAVISSGGSTNYADSVKGRFTISRDNSKNTVYLQMNSLRAEDTAVYYCMYSGSYYYTPNDYWGQGTLVTVSS

SEQ ID NO: 351 - protein, 696 aa, Artificial Sequence
  source: /note="Description of Artificial Sequence: Synthetic polypeptide"
APTSSSTKKTQLQLEHLLLDLQMILNGINNYKNPKLTRMLTFKFYMPKKATELKHLQCLEEELKPLEEVLNLAQSKNFHLRPRDLISNINVIVLELKGSETTFMCEYADETATIVEFLNRWITFCQSIISTLTSGGPGPAGLYAQPGSEVQLVESGGGLVQPGNSLRLSCAASGFTFSKFGMSWVRQAPGKGLEWVSSISGSGRDTLYAESVKGRFTISRDNAKTTLYLQMNSLRPEDTAVYYCTIGGSLSVSSQGTLVTVSSGGGGSGGGGSGGGGSGGGGSGGGGSGGGGSSGGPGPAGLYAQPGSEVQLVESGGGLVQPGGSLRLSCAASGFTFSSYTLAWVRQAPGKGLEWVAAIDSSSYTYSPDTVRGRFTISRDNAKNSLYLQMNSLRAEDTAVYYCARDSNWDALDYWGCGTTVTVSSGGGGSGGGGSGGGGSDIQMTQSPSSLSASVGDRVTITCKAREKLWSAVAWYQQKPGKCPKALIYSASFRYSGVPSRFSGSGSGTDFTLTISSLQPEDFATYYCQQYYTYPYTFGGGTKVEIKGGGGSGGGGSGGGGSGGGGSGGGGSGGGGSEVQLLESGGGLVQPGGSLRLSCAASGSIFSANAMGWYRQAPGKGLELVAVISSGGSTNYADSVKGRFTISRDNSKNTVYLQMNSLRAEDTAVYYCMYSGSYYYTPNDYWGQGTLVTVSS

SEQ ID NO: 352 - protein, 696 aa, Artificial Sequence
  source: /note="Description of Artificial Sequence: Synthetic polypeptide"
APTSSSTKKTQLQLEHLLLDLQMILNGINNYKNPKLTRMLTFKFYMPKKATELKHLQCLEEELKPLEEVLNLAQSKNFHLRPRDLISNINVIVLELKGSETTFMCEYADETATIVEFLNRWITFCQSIISTLTSGGPGPAGLYAQPGSEVQLVESGGGLVQPGNSLRLSCAASGFTFSKFGMSWVRQAPGKGLEWVSSISGSGRDTLYAESVKGRFTISRDNAKTTLYLQMNSLRPEDTAVYYCTIGGSLSVSSQGTLVTVSSGGGGSGGGGSGGGGSGGGGSGGGGSGGGGSSGGPGPAGLYAQPGSEVQLVESGGGLVQPGGSLRLSCAASGFTFSSYTLAWVRQAPGKCLEWVAAIDSSSYTYSPDTVRGRFTISRDNAKNSLYLQMNSLRAEDTAVYYCARDSNWDALDYWGQGTTVTVSSGGGGSGGGGSGGGGSDIQMTQSPSSLSASVGDRVTITCKVTEKVWGNVAWYQQKPGKAPISLIYSPSLRKSGVPSRFSGSGSGTDFTLTISSLQPEDFATYYCQQYYTYPYTFGCGTKVEIKGGGGSGGGGSGGGGSGGGGSGGGGSGGGGSEVQLLESGGGLVQPGGSLRLSCAASGSIFSANAMGWYRQAPGKGLELVAVISSGGSTNYADSVKGRFTISRDNSKNTVYLQMNSLRAEDTAVYYCMYSGSYYYTPNDYWGQGTLVTVSS

SEQ ID NO: 353 - protein, 696 aa, Artificial Sequence
  source: /note="Description of Artificial Sequence: Synthetic polypeptide"
APTSSSTKKTQLQLEHLLLDLQMILNGINNYKNPKLTRMLTFKFYMPKKATELKHLQCLEEELKPLEEVLNLAQSKNFHLRPRDLISNINVIVLELKGSETTFMCEYADETATIVEFLNRWITFCQSIISTLTSGGPGPAGLYAQPGSEVQLVESGGGLVQPGNSLRLSCAASGFTFSKFGMSWVRQAPGKGLEWVSSISGSGRDTLYAESVKGRFTISRDNAKTTLYLQMNSLRPEDTAVYYCTIGGSLSVSSQGTLVTVSSGGGGSGGGGSGGGGSGGGGSGGGGSGGGGSSGGPGPAGLYAQPGSEVQLVESGGGLVQPGGSLRLSCAASGFTFSSYTLAWVRQAPGKGLEWVAAIDSSSYTYSPDTVRGRFTISRDNAKNSLYLQMNSLRAEDTAVYYCARDSNWDALDYWGCGTTVTVSSGGGGSGGGGSGGGGSDIQMTQSPSSLSASVGDRVTITCKVTEKVWGNVAWYQQKPGKCPISLIYSPSLRKSGVPSRFSGSGSGTDFTLTISSLQPEDFATYYCQQYYTYPYTFGGGTKVEIKGGGGSGGGGSGGGGSGGGGSGGGGSGGGGSEVQLLESGGGLVQPGGSLRLSCAASGSIFSANAMGWYRQAPGKGLELVAVISSGGSTNYADSVKGRFTISRDNSKNTVYLQMNSLRAEDTAVYYCMYSGSYYYTPNDYWGQGTLVTVSS

SEQ ID NO: 354 - protein, 6 aa, Artificial Sequence
  source: /note="Description of Artificial Sequence: Synthetic 6xHis tag"
HHHHHH

SEQ ID NO: 355 - protein, 547 aa, Artificial Sequence
  source: /note="Description of Artificial Sequence: Synthetic polypeptide"
APTSSSTKKTQLQLEHLLLDLQMILNGINNYKNPKLTRMLTFKFYMPKKATELKHLQCLEEELKPLEEVLNLAQSKNFHLRPRDLISNINVIVLELKGSETTFMCEYADETATIVEFLNRWITFCQSIISTLTSGGPGPAGLYAQPGSEVQLVESGGGLVQPGNSLRLSCAASGFTFSKFGMSWVRQAPGKGLEWVSSISGSGRDTLYAESVKGRFTISRDNAKTTLYLQMNSLRPEDTAVYYCTIGGSLSVSSQGTLVTVSSGGGGSGGGGSGGGGSGGGGSGGGGSGGGGSSGGPGPAGLYAQPGSEVQLVESGGGLVQPGGSLRLSCAASGFTFSSYTLAWVRQAPGKCLEWVAAIDSSSYTYSPDTVRGRFTISRDNAKNSLYLQMNSLRAEDTAVYYCARDSNWDALDYWGQGTTVTVSSGGGGSGGGGSGGGGSDIQMTQSPSSLSASVGDRVTITCKASQNVGTNVGWYQQKPGKAPKALIYSASFRYSGVPSRFSGSGSGTDFTLTISSLQPEDFATYYCQQYYTYPYTFGCGTKVEIK

SEQ ID NO: 356 - protein, 547 aa, Artificial Sequence
  source: /note="Description of Artificial Sequence: Synthetic polypeptide"
APTSSSTKKTQLQLEHLLLDLQMILNGINNYKNPKLTRMLTFKFYMPKKATELKHLQCLEEELKPLEEVLNLAQSKNFHLRPRDLISNINVIVLELKGSETTFMCEYADETATIVEFLNRWITFCQSIISTLTSGGPGPAGLYAQPGSEVQLVESGGGLVQPGNSLRLSCAASGFTFSKFGMSWVRQAPGKGLEWVSSISGSGRDTLYAESVKGRFTISRDNAKTTLYLQMNSLRPEDTAVYYCTIGGSLSVSSQGTLVTVSSGGGGSGGGGSGGGGSGGGGSGGGGSGGGGSSGGPGPAGLYAQPGSEVQLVESGGGLVQPGGSLRLSCAASGFTFSSYTLAWVRQAPGKGLEWVAAIDSSSYTYSPDTVRGRFTISRDNAKNSLYLQMNSLRAEDTAVYYCARDSNWDALDYWGCGTTVTVSSGGGGSGGGGSGGGGSDIQMTQSPSSLSASVGDRVTITCKASQNVGTNVGWYQQKPGKCPKALIYSASFRYSGVPSRFSGSGSGTDFTLTISSLQPEDFATYYCQQYYTYPYTFGGGTKVEIK

SEQ ID NO: 357 - protein, 547 aa, Artificial Sequence
  source: /note="Description of Artificial Sequence: Synthetic polypeptide"
APTSSSTKKTQLQLEHLLLDLQMILNGINNYKNPKLTRMLTFKFYMPKKATELKHLQCLEEELKPLEEVLNLAQSKNFHLRPRDLISNINVIVLELKGSETTFMCEYADETATIVEFLNRWITFCQSIISTLTSGGPGPAGLYAQPGSEVQLVESGGGLVQPGNSLRLSCAASGFTFSKFGMSWVRQAPGKGLEWVSSISGSGRDTLYAESVKGRFTISRDNAKTTLYLQMNSLRPEDTAVYYCTIGGSLSVSSQGTLVTVSSGGGGSGGGGSGGGGSGGGGSGGGGSGGGGSSGGPGPAGLYAQPGSEVQLVESGGGLVQPGGSLRLSCAASGFTFSSYTLAWVRQAPGKCLEWVAAIDSSSYTYSPDTVRGRFTISRDNAKNSLYLQMNSLRAEDTAVYYCARDSNWDALDYWGQGTTVTVSSGGGGSGGGGSGGGGSDIQMTQSPSSLSASVGDRVTITCKAREKLWSAVAWYQQKPGKAPKALIYSASFRYSGVPSRFSGSGSGTDFTLTISSLQPEDFATYYCQQYYTYPYTFGCGTKVEIK

SEQ ID NO: 358 - protein, 547 aa, Artificial Sequence
  source: /note="Description of Artificial Sequence: Synthetic polypeptide"
APTSSSTKKTQLQLEHLLLDLQMILNGINNYKNPKLTRMLTFKFYMPKKATELKHLQCLEEELKPLEEVLNLAQSKNFHLRPRDLISNINVIVLELKGSETTFMCEYADETATIVEFLNRWITFCQSIISTLTSGGPGPAGLYAQPGSEVQLVESGGGLVQPGNSLRLSCAASGFTFSKFGMSWVRQAPGKGLEWVSSISGSGRDTLYAESVKGRFTISRDNAKTTLYLQMNSLRPEDTAVYYCTIGGSLSVSSQGTLVTVSSGGGGSGGGGSGGGGSGGGGSGGGGSGGGGSSGGPGPAGLYAQPGSEVQLVESGGGLVQPGGSLRLSCAASGFTFSSYTLAWVRQAPGKGLEWVAAIDSSSYTYSPDTVRGRFTISRDNAKNSLYLQMNSLRAEDTAVYYCARDSNWDALDYWGCGTTVTVSSGGGGSGGGGSGGGGSDIQMTQSPSSLSASVGDRVTITCKAREKLWSAVAWYQQKPGKCPKALIYSASFRYSGVPSRFSGSGSGTDFTLTISSLQPEDFATYYCQQYYTYPYTFGGGTKVEIK

SEQ ID NO: 359 - protein, 547 aa, Artificial Sequence
  source: /note="Description of Artificial Sequence: Synthetic polypeptide"
APTSSSTKKTQLQLEHLLLDLQMILNGINNYKNPKLTRMLTFKFYMPKKATELKHLQCLEEELKPLEEVLNLAQSKNFHLRPRDLISNINVIVLELKGSETTFMCEYADETATIVEFLNRWITFCQSIISTLTSGGPGPAGLYAQPGSEVQLVESGGGLVQPGNSLRLSCAASGFTFSKFGMSWVRQAPGKGLEWVSSISGSGRDTLYAESVKGRFTISRDNAKTTLYLQMNSLRPEDTAVYYCTIGGSLSVSSQGTLVTVSSGGGGSGGGGSGGGGSGGGGSGGGGSGGGGSSGGPGPAGLYAQPGSEVQLVESGGGLVQPGGSLRLSCAASGFTFSSYTLAWVRQAPGKCLEWVAAIDSSSYTYSPDTVRGRFTISRDNAKNSLYLQMNSLRAEDTAVYYCARDSNWDALDYWGQGTTVTVSSGGGGSGGGGSGGGGSDIQMTQSPSSLSASVGDRVTITCKVTEKVWGNVAWYQQKPGKAPISLIYSPSLRKSGVPSRFSGSGSGTDFTLTISSLQPEDFATYYCQQYYTYPYTFGCGTKVEIK

SEQ ID NO: 360 - protein, 547 aa, Artificial Sequence
  source: /note="Description of Artificial Sequence: Synthetic polypeptide"
APTSSSTKKTQLQLEHLLLDLQMILNGINNYKNPKLTRMLTFKFYMPKKATELKHLQCLEEELKPLEEVLNLAQSKNFHLRPRDLISNINVIVLELKGSETTFMCEYADETATIVEFLNRWITFCQSIISTLTSGGPGPAGLYAQPGSEVQLVESGGGLVQPGNSLRLSCAASGFTFSKFGMSWVRQAPGKGLEWVSSISGSGRDTLYAESVKGRFTISRDNAKTTLYLQMNSLRPEDTAVYYCTIGGSLSVSSQGTLVTVSSGGGGSGGGGSGGGGSGGGGSGGGGSGGGGSSGGPGPAGLYAQPGSEVQLVESGGGLVQPGGSLRLSCAASGFTFSSYTLAWVRQAPGKGLEWVAAIDSSSYTYSPDTVRGRFTISRDNAKNSLYLQMNSLRAEDTAVYYCARDSNWDALDYWGCGTTVTVSSGGGGSGGGGSGGGGSDIQMTQSPSSLSASVGDRVTITCKVTEKVWGNVAWYQQKPGKCPISLIYSPSLRKSGVPSRFSGSGSGTDFTLTISSLQPEDFATYYCQQYYTYPYTFGGGTKVEIK

SEQ ID NO: 361 - protein, 427 aa, Artificial Sequence
  source: /note="Description of Artificial Sequence: Synthetic polypeptide"
APTSSSTKKTQLQLEHLLLDLQMILNGINNYKNPKLTRMLTFKFYMPKKATELKHLQCLEEELKPLEEVLNLAQSKNFHLRPRDLISNINVIVLELKGSETTFMCEYADETATIVEFLNRWITFCQSIISTLTSGGPGPAGLYAQPGSEVQLVESGGGLVQPGNSLRLSCAASGFTFSKFGMSWVRQAPGKGLEWVSSISGSGRDTLYAESVKGRFTISRDNAKTTLYLQMNSLRPEDTAVYYCTIGGSLSVSSQGTLVTVSSGGGGSGGGGSGGGGSGGGGSGGGGSGGGGSSGGPGPAGLYAQPGSEVQLLESGGGLVQPGGSLRLSCAASGSIFSANAMGWYRQAPGKQRELVAVISSGGSTNYADSVKGRFTISRDNSKNTVYLQMNSLRAEDTAVYYCMYSGSYYYTPNDYWGQGTLVTVSS

SEQ ID NO: 362 - protein, 528 aa, Artificial Sequence
  source: /note="Description of Artificial Sequence: Synthetic polypeptide"
APTSSSTKKTQLQLEHLLLDLQMILNGINNYKNPKLTRMLTFKFYMPKKATELKHLQCLEEELKPLEEVLNLAQSKNFHLRPRDLISNINVIVLELKGSETTFMCEYADETATIVEFLNRWITFCQSIISTLTSGGPGPAGLYAQPGSEVQLVESGGGLVQPGNSLRLSCAASGFTFSKFGMSWVRQAPGKGLEWVSSISGSGRDTLYAESVKGRFTISRDNAKTTLYLQMNSLRPEDTAVYYCTIGGSLSVSSQGTLVTVSSGGGGSGGGGSGGGGSGGGGSGGGGSGGGGSSGGPGPAGLYAQPGSEVQLVESGGGLVQPGGSLRLSCAASGFTFSSYTLAWVRQAPGKGLEWVAAIDSSSYTYSPDTVRGRFTISRDNAKNSLYLQMNSLRAEDTAVYYCARDSNWDALDYWGQGTTVTVSSASTKGPSVFPLAPSSKSTSGGTAALGCLVKDYFPEPVTVSWNSGALTSGVHTFPAVLQSSGLYSLSSVVTVPSSSLGTQTYICNVNHKPSNTKVDKRVEPKSC

SEQ ID NO: 363 - protein, 642 aa, Artificial Sequence
  source: /note="Description of Artificial Sequence: Synthetic polypeptide"
ESKYGPPCPPCPAPEFLGGPSVFLFPPKPKDTLMISRTPEVTCVVVDVSQEDPEVQFNWYVDGVEVHNAKTKPREEQFNSTYRVVSVLTVLHQDWLNGKEYKCKVSNKGLPSSIEKTISKAKGQPREPQVYTLPPSQEEMTKNQVSLTCLVKGFYPSDIAVEWESNGQPENNYKTTPPVLDSDGSFFLYSRLTVDKSRWQEGNVFSCSVMHEALHNHYTQKSLSLSLGKSGGPGPAGLYAQPGSAPTSSSTKKTQLQLEHLLLDLQMILNGINNYKNPKLTRMLTFKFYMPKKATELKHLQCLEEELKPLEEVLNLAQSKNFHLRPRDLISNINVIVLELKGSETTFMCEYADETATIVEFLNRWITFCQSIISTLTGGGGSGGGGSGGGGSGGGGSGGGGSGGGGSSGGPGPAGLYAQPGSEVQLVESGGGLVQPGGSLRLSCAASGFTFSSYTLAWVRQAPGKGLEWVAAIDSSSYTYSPDTVRGRFTISRDNAKNSLYLQMNSLRAEDTAVYYCARDSNWDALDYWGQGTTVTVSSASTKGPSVFPLAPSSKSTSGGTAALGCLVKDYFPEPVTVSWNSGALTSGVHTFPAVLQSSGLYSLSSVVTVPSSSLGTQTYICNVNHKPSNTKVDKRVEPKSC

SEQ ID NO: 364 - protein, 245 aa, Artificial Sequence
  source: /note="Description of Artificial Sequence: Synthetic polypeptide"
EVQLVESGGGLVQPGGSLRLSCAASGFTFSSYTLAWVRQAPGKGLEWVAAIDSSSYTYSPDTVRGRFTISRDNAKNSLYLQMNSLRAEDTAVYYCARDSNWDALDYWGQGTTVTVSSSGGPGPAGLYAQPGSDIQMTQSPSSLSASVGDRVTITCKVTEKVWGNVAWYQQKPGKAPISLIYSPSLRKSGVPSRFSGSGSGTDFTLTISSLQPEDFATYYCQQYYTYPYTFGGGTKVEIKHHHHHH

SEQ ID NO: 365 - protein, 245 aa, Artificial Sequence
  source: /note="Description of Artificial Sequence: Synthetic polypeptide"
EVQLVESGGGLVQPGGSLRLSCAASGFTFSSYTLAWVRQAPGKGLEWVAAIDSSSYTYSPDTVRGRFTISRDNAKNSLYLQMNSLRAEDTAVYYCARDSNWDALDYWGQGTTVTVSSSGGPGPAGLYAQPGSDIQMTQSPSSLSASVGDRVTITCKAREKLWSAVAWYQQKPGKAPKALIYSASFRYSGVPSRFSGSGSGTDFTLTISSLQPEDFATYYCQQYYTYPYTFGGGTKVEIKHHHHHH

SEQ ID NO: 366 - protein, 245 aa, Artificial Sequence
  source: /note="Description of Artificial Sequence: Synthetic polypeptide"
EVQLVESGGGLVQPGGSLRLSCAASGFTFSSYTLAWVRQAPGKGLEWVAAIDSSSYTYSPDTVRGRFTISRDNAKNSLYLQMNSLRAEDTAVYYCARDSNWDALDYWGQGTTVTVSSSGGPGPAGLYAQPGSDIQMTQSPSSLSASVGDRVTITCKAREKLWSAVAWYQQKPGKAPKSLIYSASFRYSGVPSRFSGSGSGTDFTLTISSLQPEDFATYYCQQYYTYPYTFGGGTKVEIKHHHHHH

SEQ ID NO: 367 - protein, 609 aa, Artificial Sequence
  source: /note="Description of Artificial Sequence: Synthetic polypeptide"
EVQLVESGGGLVQPGNSLRLSCAASGFTFSKFGMSWVRQAPGKGLEWVSSISGSGRDTLYAESVKGRFTISRDNAKTTLYLQMNSLRPEDTAVYYCTIGGSLSVSSQGTLVTVSSSGGPGPAGMKGLPGSRVIPVSGPARCLSQSRNLLKTTDDMVKTAREKLKHYSCTAEDIDHEDITRDQTSTLKTCLPLELHKNESCLATRETSSTTRGSCLPPQKTSLMMTLCLGSIYEDLKMYQTEFQAINAALQNHNHQQIILDKGMLVAIDELMQSLNHNGETLRQKPPVGEADPYRVKMKLCILLHAFSTRVVTINRVMGYLSSASGGPGPAGMKGLPGSGGGGSGGGGSGGGGSGGGGSGGGGSGGGGSQSVLTQPPSVSGAPGQRVTISCSGSRSNIGSNTVKWYQQLPGTAPKLLIYYNDQRPSGVPDRFSGSKSGTSASLAITGLQAEDEADYYCQSYDRYTHPALLFGTGTKVTVLGGGGSGGGGSGGGGSQVQLVESGGGVVQPGRSLRLSCAASGFTFSSYGMHWVRQAPGKGLEWVAFIRYDGSNKYYADSVKGRFTISRDNSKNTLYLQMNSLRAEDTAVYYCKTHGSHDNWGQGTMVTVSS

SEQ ID NO: 368 - protein, 930 aa, Artificial Sequence
  source: /note="Description of Artificial Sequence: Synthetic polypeptide"
EVQLVESGGGLVQPGNSLRLSCAASGFTFSKFGMSWVRQAPGKGLEWVSSISGSGRDTLYAESVKGRFTISRDNAKTTLYLQMNSLRPEDTAVYYCTIGGSLSVSSQGTLVTVSSSGGPGPAGMKGLPGSIWELKKDVYVVELDWYPDAPGEMVVLTCDTPEEDGITWTLDQSSEVLGSGKTLTIQVKEFGDAGQYTCHKGGEVLSHSLLLLHKKEDGIWSTDILKDQKEPKNKTFLRCEAKNYSGRFTCWWLTTISTDLTFSVKSSRGSSDPQGVTCGAATLSAERVRGDNKEYEYSVECQEDSASPAAEESLPIEVMVDAVHKLKYENYTSSFFIRDIIKPDPPKNLQLKPLKNSRQVEVSWEYPDTWSTPHSYFSLTFCVQVQGKSKREKKDRVFTDKTSATVICRKNASISVRAQDRYYSSSWSEWASVPCSGGGGSGGGGSGGGGSRVIPVSGPARCLSQSRNLLKTTDDMVKTAREKLKHYSCTAEDIDHEDITRDQTSTLKTCLPLELHKNESSLATRETSSTTRGSCLPPQKTSLMMTLCLGSIYEDLKMYQTEFQAINAALQNHNHQQIILDKGMLVAIDELMQSLNHNGETLRQKPPVGEADPYRVKMKLCILLHAFSTRVVTINRVMGYLSSASGGPGPAGMKGLPGSGGGGSGGGGSGGGGSGGGGSGGGGSGGGGSQSVLTQPPSVSGAPGQRVTISCSGSRSNIGSNTVKWYQQLPGTAPKLLIYYNDQRPSGVPDRFSGSKSGTSASLAITGLQAEDEADYYCQSYDRYTHPALLFGTGTKVTVLGGGGSGGGGSGGGGSQVQLVESGGGVVQPGRSLRLSCAASGFTFSSYGMHWVRQAPGKGLEWVAFIRYDGSNKYYADSVKGRFTISRDNSKNTLYLQMNSLRAEDTAVYYCKTHGSHDNWGQGTMVTVSS

SEQ ID NO: 369 - protein, 935 aa, Artificial Sequence
  source: /note="Description of Artificial Sequence: Synthetic polypeptide"
EVQLVESGGGLVQPGNSLRLSCAASGFTFSKFGMSWVRQAPGKGLEWVSSISGSGRDTLYAESVKGRFTISRDNAKTTLYLQMNSLRPEDTAVYYCTIGGSLSVSSQGTLVTVSSSGGPGPAGMKGLPGSIWELKKDVYVVELDWYPDAPGEMVVLTCDTPEEDGITWTLDQSSEVLGSGKTLTIQVKEFGDAGQYTCHKGGEVLSHSLLLLHKKEDGIWSTDILKDQKEPKNKTFLRCEAKNYSGRFTCWWLTTISTDLTFSVKSSRGSSDPQGVTCGAATLSAERVRGDNKEYEYSVECQEDSACPAAEESLPIEVMVDAVHKLKYENYTSSFFIRDIIKPDPPKNLQLKPLKNSRQVEVSWEYPDTWSTPHSYFSLTFCVQVQGKSKREKKDRVFTDKTSATVICRKNASISVRAQDRYYSSSWSEWASVPCSGGGGSGGGGSGGGGSGGGGSRVIPVSGPARCLSQSRNLLKTTDDMVKTAREKLKHYSCTAEDIDHEDITRDQTSTLKTCLPLELHKNESCLATRETSSTTRGSCLPPQKTSLMMTLCLGSIYEDLKMYQTEFQAINAALQNHNHQQIILDKGMLVAIDELMQSLNHNGETLRQKPPVGEADPYRVKMKLCILLHAFSTRVVTINRVMGYLSSASGGPGPAGMKGLPGSGGGGSGGGGSGGGGSGGGGSGGGGSGGGGSQSVLTQPPSVSGAPGQRVTISCSGSRSNIGSNTVKWYQQLPGTAPKLLIYYNDQRPSGVPDRFSGSKSGTSASLAITGLQAEDEADYYCQSYDRYTHPALLFGTGTKVTVLGGGGSGGGGSGGGGSQVQLVESGGGVVQPGRSLRLSCAASGFTFSSYGMHWVRQAPGKGLEWVAFIRYDGSNKYYADSVKGRFTISRDNSKNTLYLQMNSLRAEDTAVYYCKTHGSHDNWGQGTMVTVSS

SEQ ID NO: 370 - protein, 930 aa, Artificial Sequence
  source: /note="Description of Artificial Sequence: Synthetic polypeptide"
EVQLVESGGGLVQPGNSLRLSCAASGFTFSKFGMSWVRQAPGKGLEWVSSISGSGRDTLYAESVKGRFTISRDNAKTTLYLQMNSLRPEDTAVYYCTIGGSLSVSSQGTLVTVSSSGGPGPAGMKGLPGSIWELKKDVYVVELDWYPDAPGEMVVLTCDTPEEDGITWTLDQSSEVLGSGKTLTIQVKEFGDAGQYTCHKGGEVLSHSLLLLHKKEDGIWSTDILKDQKEPKNKTFLRCEAKNYSGRFTCWWLTTISTDLTFSVKSSRGSSDPQGVTCGAATLSAERVRGDNKEYEYSVECQEDSACPAAEESLPIEVMVDAVHKLKYENYTSSFFIRDIIKPDPPKNLQLKPLKNSRQVEVSWEYPDTWSTPHSYFSLTFCVQVQGKSKREKKDRVFTDKTSATVICRKNASISVRAQDRYYSSSWSEWASVPCSGGGGSGGGGSGGGGSRVIPVSGPARCLSQSRNLLKTTDDMVKTAREKLKHYSCTAEDIDHEDITRDQTSTLKTCLPLELHKNESCLATRETSSTTRGSCLPPQKTSLMMTLCLGSIYEDLKMYQTEFQAINAALQNHNHQQIILDKGMLVAIDELMQSLNHNGETLRQKPPVGEADPYRVKMKLCILLHAFSTRVVTINRVMGYLSSASGGPGPAGMKGLPGSGGGGSGGGGSGGGGSGGGGSGGGGSGGGGSQSVLTQPPSVSGAPGQRVTISCSGSRSNIGSNTVKWYQQLPGTAPKLLIYYNDQRPSGVPDRFSGSKSGTSASLAITGLQAEDEADYYCQSYDRYTHPALLFGCGTKVTVLGGGGSGGGGSGGGGSQVQLVESGGGVVQPGRSLRLSCAASGFTFSSYGMHWVRQAPGKCLEWVAFIRYDGSNKYYADSVKGRFTISRDNSKNTLYLQMNSLRAEDTAVYYCKTHGSHDNWGQGTMVTVSS

SEQ ID NO: 371 - protein, 930 aa, Artificial Sequence
  source: /note="Description of Artificial Sequence: Synthetic polypeptide"
EVQLVESGGGLVQPGNSLRLSCAASGFTFSKFGMSWVRQAPGKGLEWVSSISGSGRDTLYAESVKGRFTISRDNAKTTLYLQMNSLRPEDTAVYYCTIGGSLSVSSQGTLVTVSSSGGPGPAGMKGLPGSIWELKKDVYVVELDWYPDAPGEMVVLTCDTPEEDGITWTLDQSSEVLGSGKTLTIQVKEFGDAGQYTCHKGGEVLSHSLLLLHKKEDGIWSTDILKDQKEPKNKTFLRCEAKNYSGRFTCWWLTTISTDLTFSVKSSRGSSDPQGVTCGAATLSAERVRGDNKEYEYSVECQEDSACPAAEESLPIEVMVDAVHKLKYENYTSSFFIRDIIKPDPPKNLQLKPLKNSRQVEVSWEYPDTWSTPHSYFSLTFCVQVQGKSKREKKDRVFTDKTSATVICRKNASISVRAQDRYYSSSWSEWASVPCSGGGGSGGGGSGGGGSRVIPVSGPARCLSQSRNLLKTTDDMVKTAREKLKHYSCTAEDIDHEDITRDQTSTLKTCLPLELHKNESCLATRETSSTTRGSCLPPQKTSLMMTLCLGSIYEDLKMYQTEFQAINAALQNHNHQQIILDKGMLVAIDELMQSLNHNGETLRQKPPVGEADPYRVKMKLCILLHAFSTRVVTINRVMGYLSSASGGPGPAGMKGLPGSGGGGSGGGGSGGGGSGGGGSGGGGSGGGGSQSVLTQPPSVSGAPGQRVTISCSGSRSNIGSNTVKWYQQLPGTCPKLLIYYNDQRPSGVPDRFSGSKSGTSASLAITGLQAEDEADYYCQSYDRYTHPALLFGTGTKVTVLGGGGSGGGGSGGGGSQVQLVESGGGVVQPGRSLRLSCAASGFTFSSYGMHWVRQAPGKGLEWVAFIRYDGSNKYYADSVKGRFTISRDNSKNTLYLQMNSLRAEDTAVYYCKTHGSHDNWGCGTMVTVSS

SEQ ID NO: 372 - protein, 553 aa, Artificial Sequence; identical to SEQ ID NO: 49
  source: /note="Description of Artificial Sequence: Synthetic polypeptide"

SEQ ID NO: 373 - protein, 444 aa, Artificial Sequence
  source: /note="Description of Artificial Sequence: Synthetic polypeptide"
APTSSSTKKTQLQLEHLLLDLQMILNGINNYKNPKLTRMLTFKFYMPKKATELKHLQCLEEELKPLEEVLNLAQSKNFHLRPRDLISNINVIVLELKGSETTFMCEYADETATIVEFLNRWITFCQSIISTLTSGGPGPAGMKGLPGSEVQLVESGGGLVQPGNSLRLSCAASGFTFSKFGMSWVRQAPGKGLEWVSSISGSGRDTLYAESVKGRFTISRDNAKTTLYLQMNSLRPEDTAVYYCTIGGSLSVSSQGTLVTVSSGGGGSGGGGSGGGGSGGGGSGGGGSGGGGSSGGPGPAGMKGLPGQVQLQESGGGLVQTGGSLRLSCTTSGTIFSGYTMGWYRQAPGEQRELVAVISGGGDTNYADSVKGRFTISRDNTKDTMYLQMNSLKPEDTAVYYCYSREVTPPWKLYWGQGTQVTVSSAAAYPYDVPDYGSHHHHHH

SEQ ID NO: 374 - protein, 444 aa, Artificial Sequence
  source: /note="Description of Artificial Sequence: Synthetic polypeptide"
APTSSSTKKTQLQLEHLLLDLQMILNGINNYKNPKLTRMLTFKFYMPKKATELKHLQCLEEELKPLEEVLNLAQSKNFHLRPRDLISNINVIVLELKGSETTFMCEYADETATIVEFLNRWITFCQSIISTLTSGGPGPAGMKGLPGSEVQLVESGGGLVQPGNSLRLSCAASGFTFSKFGMSWVRQAPGKGLEWVSSISGSGRDTLYAESVKGRFTISRDNAKTTLYLQMNSLRPEDTAVYYCTIGGSLSVSSQGTLVTVSSGGGGSGGGGSGGGGSGGGGSGGGGSGGGGSSGGPGPAGMKGLPGQVQLQESGGGLVQEGGSLRLSCAASERIFSTDVMGWYRQAAEKQRELVAVVSARGTTNYLDAVKGRFTISRDNARNTLTLQMNDLKPEDTASYYCYVRETTSPWRIYWGQGTQVTVSSAAAYPYDVPDYGSHHHHHH

SEQ ID NO: 375 - protein, 445 aa, Artificial Sequence
  source: /note="Description of Artificial Sequence: Synthetic polypeptide"
APTSSSTKKTQLQLEHLLLDLQMILNGINNYKNPKLTRMLTFKFYMPKKATELKHLQCLEEELKPLEEVLNLAQSKNFHLRPRDLISNINVIVLELKGSETTFMCEYADETATIVEFLNRWITFCQSIISTLTSGGPGPAGMKGLPGSEVQLVESGGGLVQPGNSLRLSCAASGFTFSKFGMSWVRQAPGKGLEWVSSISGSGRDTLYAESVKGRFTISRDNAKTTLYLQMNSLRPEDTAVYYCTIGGSLSVSSQGTLVTVSSGGGGSGGGGSGGGGSGGGGSGGGGSGGGGSSGGPGPAGMKGLPGQVQLQESGGGLVQAGGSLRLSCAASGSIFSANAMGWYRQAPGKQRELVAVISSGGSTNYADSVKGRFTISRDNAKNTVYLQMNSLKPEDTAVYYCMYSGSYYYTPNDYWGQGTQVTVSSAAAYPYDVPDYGSHHHHHH

SEQ ID NO: 376 - protein, 557 aa, Artificial Sequence
  source: /note="Description of Artificial Sequence: Synthetic polypeptide"
APTSSSTKKTQLQLEHLLLDLQMILNGINNYKNPKLTRMLTFKFYMPKKATELKHLQCLEEELKPLEEVLNLAQSKNFHLRPRDLISNINVIVLELKGSETTFMCEYADETATIVEFLNRWITFCQSIISTLTSGGPGPAGMKGLPGSEVQLVESGGGLVQPGNSLRLSCAASGFTFSKFGMSWVRQAPGKGLEWVSSISGSGRDTLYAESVKGRFTISRDNAKTTLYLQMNSLRPEDTAVYYCTIGGSLSVSSQGTLVTVSSGGGGSGGGGSGGGGSGGGGSGGGGSGGGGSSGGPGPAGMKGLPGSEVQLVESGGGLVQPGGSLRLSCAASGFTFSSYTLAWVRQAPGKGLEWVAAIDSSSYTYSPDTVRGRFTISRDNAKNSLYLQMNSLRAEDTAVYYCARDSNWDALDYWGQGTTVTVSSSGGPGPAGMKGLPGSDIQMTQSPSSLSASVGDRVTITCKASQNVGTNVGWYQQKPGKAPKALIYSASFRYSGVPSRFSGSGSGTDFTLTISSLQPEDFATYYCQQYYTYPYTFGGGTKVEIKHHHHHHEPEA

SEQ ID NO: 377 - protein, 557 aa, Artificial Sequence
  source: /note="Description of Artificial Sequence: Synthetic polypeptide"
APTSSSTKKTQLQLEHLLLDLQMILNGINNYKNPKLTRMLTFKFYMPKKATELKHLQCLEEELKPLEEVLNLAQSKNFHLRPRDLISNINVIVLELKGSETTFMCEYADETATIVEFLNRWITFCQSIISTLTSGGPGPAGMKGLPGSEVQLVESGGGLVQPGNSLRLSCAASGFTFSKFGMSWVRQAPGKGLEWVSSISGSGRDTLYAESVKGRFTISRDNAKTTLYLQMNSLRPEDTAVYYCTIGGSLSVSSQGTLVTVSSGGGGSGGGGSGGGGSGGGGSGGGGSGGGGSSGGPGPAGMKGLPGSEVQLVESGGGLVQPGGSLRLSCAASGFTFSSYTLAWVRQAPGKGLEWVAAIDSSSYTYSPDTVRGRFTISRDNAKNSLYLQMNSLRAEDTAVYYCARDSNWDALDYWGQGTTVTVSSGGGGSGGGGSGGGGSDIQMTQSPSSLSASVGDRVTITCKASQNVGTNVGWYQQKPGKAPKLLIYSASFRYSGVPSRFSGSGSGTDFTLTISSLQPEDFATYYCQQYYTYPYTFGGGTKVEIKHHHHHHEPEA

SEQ ID NO: 378 - protein, 557 aa, Artificial Sequence
  source: /note="Description of Artificial Sequence: Synthetic polypeptide"
APTSSSTKKTQLQLEHLLLDLQMILNGINNYKNPKLTRMLTFKFYMPKKATELKHLQCLEEELKPLEEVLNLAQSKNFHLRPRDLISNINVIVLELKGSETTFMCEYADETATIVEFLNRWITFCQSIISTLTSGGPGPAGMKGLPGSEVQLVESGGGLVQPGNSLRLSCAASGFTFSKFGMSWVRQAPGKGLEWVSSISGSGRDTLYAESVKGRFTISRDNAKTTLYLQMNSLRPEDTAVYYCTIGGSLSVSSQGTLVTVSSGGGGSGGGGSGGGGSGGGGSGGGGSGGGGSSGGPGPAGMKGLPGSEVQLVESGGGLVQPGGSLRLSCAASGFTFSSYTLAWVRQAPGKGLEWVAAIDSSSYTYSPDTVRGRFTISRDNAKNSLYLQMNSLRAEDTAVYYCARDSNWDALDYWGQGTTVTVSSGGGGSGGGGSGGGGSDIQMTQSPSSLSASVGDRVTITCKASQNVGTNVGWYQQKPGKAPKGLIYSASFRYSGVPSRFSGSGSGTDFTLTISSLQPEDFATYYCQQYYTYPYTFGGGTKVEIKHHHHHHEPEA

SEQ ID NO: 379 - protein, 557 aa, Artificial Sequence
  source: /note="Description of Artificial Sequence: Synthetic polypeptide"
APTSSSTKKTQLQLEHLLLDLQMILNGINNYKNPKLTRMLTFKFYMPKKATELKHLQCLEEELKPLEEVLNLAQSKNFHLRPRDLISNINVIVLELKGSETTFMCEYADETATIVEFLNRWITFSQSIISTLTSGGPGPAGMKGLPGSEVQLVESGGGLVQPGNSLRLSCAASGFTFSKFGMSWVRQAPGKGLEWVSSISGSGRDTLYAESVKGRFTISRDNAKTTLYLQMNSLRPEDTAVYYCTIGGSLSVSSQGTLVTVSSGGGGSGGGGSGGGGSGGGGSGGGGSGGGGSSGGPGPAGMKGLPGSEVQLVESGGGLVQPGGSLRLSCAASGFTFSSYTLAWVRQAPGKGLEWVAAIDSSSYTYSPDTVRGRFTISRDNAKNSLYLQMNSLRAEDTAVYYCARDSNWDALDYWGQGTTVTVSSGGGGSGGGGSGGGGSDIQMTQSPSSLSASVGDRVTITCKASQNVGTNVGWYQQKPGKAPKALIYSASFRYSGVPSRFSGSGSGTDFTLTISSLQPEDFATYYCQQYYTYPYTFGGGTKVEIKHHHHHHEPEA

SEQ ID NO: 380 - protein, 1027 aa, Artificial Sequence
  source: /note="Description of Artificial Sequence: Synthetic polypeptide"
APTSSSTKKTQLQLEHLLLDLQMILNGINNYKNPKLTRMLTFKFYMPKKATELKHLQCLEEELKPLEEVLNLAQSKNFHLRPRDLISNINVIVLELKGSETTFMCEYADETATIVEFLNRWITFCQSIISTLTSGGPGPAGMKGLPGSDAHKSEVAHRFKDLGEENFKALVLIAFAQYLQQCPFEDHVKLVNEVTEFAKTCVADESAENCDKSLHTLFGDKLCTVATLRETYGEMADCCAKQEPERNECFLQHKDDNPNLPRLVRPEVDVMCTAFHDNEETFLKKYLYEIARRHPYFYAPELLFFAKRYKAAFTECCQAADKAACLLPKLDELRDEGKASSAKQRLKCASLQKFGERAFKAWAVARLSQRFPKAEFAEVSKLVTDLTKVHTECCHGDLLECADDRADLAKYICENQDSISSKLKECCEKPLLEKSHCIAEVENDEMPADLPSLAADFVESKDVCKNYAEAKDVFLGMFLYEYARRHPDYSVVLLLRLAKTYETTLEKCCAAADPHECYAKVFDEFKPLVEEPQNLIKQNCELFEQLGEYKFQNALLVRYTKKVPQVSTPTLVEVSRNLGKVGSKCCKHPEAKRMPCAEDYLSVVLNQLCVLHEKTPVSDRVTKCCTESLVNRRPCFSALEVDETYVPKEFNAETFTFHADICTLSEKERQIKKQTALVELVKHKPKATKEQLKAVMDDFAAFVEKCCKADDKETCFAEEGKKLVAASQAALGLGGGGSGGGGSGGGGSGGGGSGGGGSGGGGSSGGPGPAGMKGLPGSEVQLVESGGGLVQPGGSLRLSCAASGFTFSSYTLAWVRQAPGKGLEWVAAIDSSSYTYSPDTVRGRFTISRDNAKNSLYLQMNSLRAEDTAVYYCARDSNWDALDYWGQGTTVTVSSGGGGSGGGGSGGGGSDIQMTQSPSSLSASVGDRVTITCKASQNVGTNVGWYQQKPGKAPKALIYSASFRYSGVPSRFSGSGSGTDFTLTISSLQPEDFATYYCQQYYTYPYTFGGGTKVEIKHHHHHHEPEA

SEQ ID NO: 381 - protein, 1022 aa, Artificial Sequence
  source: /note="Description of Artificial Sequence: Synthetic polypeptide"
APTSSSTKKTQLQLEHLLLDLQMILNGINNYKNPKLTRMLTFKFYMPKKATELKHLQCLEEELKPLEEVLNLAQSKNFHLRPRDLISNINVIVLELKGSETTFMCEYADETATIVEFLNRWITFCQSIISTLTSGGPGPAGMKGLPGSEAHKSEIAHRYNDLGEQHFKGLVLIAFSQYLQKCSYDEHAKLVQEVTDFAKTCVADESAANCDKSLHTLFGDKLCAIPNLRENYGELADCCTKQEPERNECFLQHKDDNPSLPPFERPEAEAMCTSFKENPTTFMGHYLHEVARRHPYFYAPELLYYAEQYNEILTQCCAEADKESCLTPKLDGVKEKALVSSVRQRMKCSSMQKFGERAFKAWAVARLSQTFPNADFAEITKLATDLTKVNKECCHGDLLECADDRAELAKYMCENQATISSKLQTCCDKPLLKKAHCLSEVEHDTMPADLPAIAADFVEDQEVCKNYAEAKDVFLGTFLYEYSRRHPDYSVSLLLRLAKKYEATLEKCCAEANPPACYGTVLAEFQPLVEEPKNLVKTNCDLYEKLGEYGFQNAILVRYTQKAPQVSTPTLVEAARNLGRVGTKCCTLPEDQRLPCVEDYLSAILNRVCLLHEKTPVSEHVTKCCSGSLVERRPCFSALTVDETYVPKEFKAETFTFHSDICTLPEKEKQIKKQTALAELVKHKPKATAEQLKTVMDDFAQFLDTCCKAADKDTCFSTEGPNLVTRCKDALAGGGGSGGGGSGGGGSGGGGSGGGGSGGGGSSGGPGPAGMKGLPGSEVQLVESGGGLVQPGGSLRLSCAASGFTFSSYTLAWVRQAPGKGLEWVAAIDSSSYTYSPDTVRGRFTISRDNAKNSLYLQMNSLRAEDTAVYYCARDSNWDALDYWGQGTTVTVSSGGGGSGGGGSGGGGSDIQMTQSPSSLSASVGDRVTITCKASQNVGTNVGWYQQKPGKAPKALIYSASFRYSGVPSRFSGSGSGTDFTLTISSLQPEDFATYYCQQYYTYPYTFGGGTKVEIKHHHHHH

SEQ ID NO: 382 - protein, 1336 aa, Artificial Sequence
  source: /note="Description of Artificial Sequence: Synthetic polypeptide"
EAHKSEIAHRYNDLGEQHFKGLVLIAFSQYLQKCSYDEHAKLVQEVTDFAKTCVADESAANCDKSLHTLFGDKLCAIPNLRENYGELADCCTKQEPERNECFLQHKDDNPSLPPFERPEAEAMCTSFKENPTTFMGHYLHEVARRHPYFYAPELLYYAEQYNEILTQCCAEADKESCLTPKLDGVKEKALVSSVRQRMKCSSMQKFGERAFKAWAVARLSQTFPNADFAEITKLATDLTKVNKECCHGDLLECADDRAELAKYMCENQATISSKLQTCCDKPLLKKAHCLSEVEHDTMPADLPAIAADFVEDQEVCKNYAEAKDVFLGTFLYEYSRRHPDYSVSLLLRLAKKYEATLEKCCAEANPPACYGTVLAEFQPLVEEPKNLVKTNCDLYEKLGEYGFQNAILVRYTQKAPQVSTPTLVEAARNLGRVGTKCCTLPEDQRLPCVEDYLSAILNRVCLLHEKTPVSEHVTKCCSGSLVERRPCFSALTVDETYVPKEFKAETFTFHSDICTLPEKEKQIKKQTALAELVKHKPKATAEQLKTVMDDFAQFLDTCCKAADKDTCFSTEGPNLVTRCKDALASGGPGPAGMKGLPGSTFKFYMPKKATELKHLQCLEEELKPLEEVLNLAQSKNFHLRPRDLISNINVIVLELKGSETTFMCEYADETATIVEFLNRWITFCQSIISTLTGGSSSTKKTQLQLEHLLLDLQMILNGINNYKNPKLTRMLSGGPGPAGMKGLPGSEAHKSEIAHRYNDLGEQHFKGLVLIAFSQYLQKCSYDEHAKLVQEVTDFAKTCVADESAANCDKSLHTLFGDKLCAIPNLRENYGELADCCTKQEPERNECFLQHKDDNPSLPPFERPEAEAMCTSFKENPTTFMGHYLHEVARRHPYFYAPELLYYAEQYNEILTQCCAEADKESCLTPKLDGVKEKALVSSVRQRMKCSSMQKFGERAFKAWAVARLSQTFPNADFAEITKLATDLTKVNKECCHGDLLECADDRAELAKYMCENQATISSKLQTCCDKPLLKKAHCLSEVEHDTMPADLPAIAADFVEDQEVCKNYAEAKDVFLGTFLYEYSRRHPDYSVSLLLRLAKKYEATLEKCCAEANPPACYGTVLAEFQPLVEEPKNLVKTNCDLYEKLGEYGFQNAILVRYTQKAPQVSTPTLVEAARNLGRVGTKCCTLPEDQRLPCVEDYLSAILNRVCLLHEKTPVSEHVTKCCSGSLVERRPCFSALTVDETYVPKEFKAETFTFHSDICTLPEKEKQIKKQTALAELVKHKPKATAEQLKTVMDDFAQFLDTCCKAADKDTCFSTEGPNLVTRCKDALAHHHHHH

SEQ ID NO: 383 - protein, 817 aa, Artificial Sequence
  source: /note="Description of Artificial Sequence: Synthetic polypeptide"
APTSSSTKKTQLQLEHLLLDLQMILNGINNYKNPKLTRMLTFKFYMPKKATELKHLQCLEEELKPLEEVLNLAQSKNFHLRPRDLISNINVIVLELKGSETTFMCEYADETATIVEFLNRWITFCQSIISTLTSGGPGPAGMKGLPGSEVQLVESGGGLVQPGNSLRLSCAASGFTFSKFGMSWVRQAPGKGLEWVSSISGSGRDTLYAESVKGRFTISRDNAKTTLYLQMNSLRPEDTAVYYCTIGGSLSVSSQGTLVTVSSGGGGSGGGGSGGGGSGGGGSGGGGSGGGGSSGGPGPAGMKGLPGSEVQLVESGGGLVQPGGSLRLSCAASGFTFSSYTLAWVRQAPGKGLEWVAAIDSSSYTYSPDTVRGRFTISRDNAKNSLYLQMNSLRAEDTAVYYCARDSNWDALDYWGQGTTVTVSSGGGGSGGGGSGGGGSDIQMTQSPSSLSASVGDRVTITCKASQNVGTNVGWYQQKPGKAPKALIYSASFRYSGVPSRFSGSGSGTDFTLTISSLQPEDFATYYCQQYYTYPYTFGGGTKVEIKSGGPGPAGMKGLPGSGGGGSGGGGSGGGGSGGGGSGGGGSGGGGSELCDDDPPEIPHATFKAMAYKEGTMLNCECKRGFRRIKSGSLYMLCTGNSSHSSWDNQCQCTSSATRNTTKQVTPQPEEQKERKTTEMQSPMQPVDQASLPGHCREPPPWENEATERIYHFVVGQMVYYQCVQGYRALHRGPAESVCKMTHGKTRWTQPQLICTGEMETSQFPGEEKPQASPEGRPESETSCLVTTTDFQIQTEMAATMETSIFTTEYQHHHHHH

SEQ ID NO: 384 - protein, 817 aa, Artificial Sequence
  source: /note="Description of Artificial Sequence: Synthetic polypeptide"
ELCDDDPPEIPHATFKAMAYKEGTMLNCECKRGFRRIKSGSLYMLCTGNSSHSSWDNQCQCTSSATRNTTKQVTPQPEEQKERKTTEMQSPMQPVDQASLPGHCREPPPWENEATERIYHFVVGQMVYYQCVQGYRALHRGPAESVCKMTHGKTRWTQPQLICTGEMETSQFPGEEKPQASPEGRPESETSCLVTTTDFQIQTEMAATMETSIFTTEYQGGGGSGGGGSGGGGSGGGGSGGGGSGGGGSSGGPGPAGMKGLPGSAPTSSSTKKTQLQLEHLLLDLQMILNGINNYKNPKLTRMLTFKFYMPKKATELKHLQCLEEELKPLEEVLNLAQSKNFHLRPRDLISNINVIVLELKGSETTFMCEYADETATIVEFLNRWITFCQSIISTLTSGGPGPAGMKGLPGSEVQLVESGGGLVQPGNSLRLSCAASGFTFSKFGMSWVRQAPGKGLEWVSSISGSGRDTLYAESVKGRFTISRDNAKTTLYLQMNSLRPEDTAVYYCTIGGSLSVSSQGTLVTVSSGGGGSGGGGSGGGGSGGGGSGGGGSGGGGSSGGPGPAGMKGLPGSEVQLVESGGGLVQPGGSLRLSCAASGFTFSSYTLAWVRQAPGKGLEWVAAIDSSSYTYSPDTVRGRFTISRDNAKNSLYLQMNSLRAEDTAVYYCARDSNWDALDYWGQGTTVTVSSGGGGSGGGGSGGGGSDIQMTQSPSSLSASVGDRVTITCKASQNVGTNVGWYQQKPGKAPKALIYSASFRYSGVPSRFSGSGSGTDFTLTISSLQPEDFATYYCQQYYTYPYTFGGGTKVEIKHHHHHH

SEQ ID NO: 385 - protein, 817 aa, Artificial Sequence
  source: /note="Description of Artificial Sequence: Synthetic polypeptide"
APTSSSTKKTQLQLEHLLLDLQMILNGINNYKNPKLTRMLTFKFYMPKKATELKHLQCLEEELKPLEEVLNLAQSKNFHLRPRDLISNINVIVLELKGSETTFMCEYADETATIVEFLNRWITFCQSIISTLTSGGPGPAGMKGLPGSGGGGSGGGGSGGGGSGGGGSGGGGSGGGGSELCDDDPPEIPHATFKAMAYKEGTMLNCECKRGFRRIKSGSLYMLCTGNSSHSSWDNQCQCTSSATRNTTKQVTPQPEEQKERKTTEMQSPMQPVDQASLPGHCREPPPWENEATERIYHFVVGQMVYYQCVQGYRALHRGPAESVCKMTHGKTRWTQPQLICTGEMETSQFPGEEKPQASPEGRPESETSCLVTTTDFQIQTEMAATMETSIFTTEYQSGGPGPAGMKGLPGSEVQLVESGGGLVQPGNSLRLSCAASGFTFSKFGMSWVRQAPGKGLEWVSSISGSGRDTLYAESVKGRFTISRDNAKTTLYLQMNSLRPEDTAVYYCTIGGSLSVSSQGTLVTVSSGGGGSGGGGSGGGGSGGGGSGGGGSGGGGSSGGPGPAGMKGLPGSEVQLVESGGGLVQPGGSLRLSCAASGFTFSSYTLAWVRQAPGKGLEWVAAIDSSSYTYSPDTVRGRFTISRDNAKNSLYLQMNSLRAEDTAVYYCARDSNWDALDYWGQGTTVTVSSGGGGSGGGGSGGGGSDIQMTQSPSSLSASVGDRVTITCKASQNVGTNVGWYQQKPGKAPKALIYSASFRYSGVPSRFSGSGSGTDFTLTISSLQPEDFATYYCQQYYTYPYTFGGGTKVEIKHHHHHH

SEQ ID NO: 386 - protein, 682 aa, Artificial Sequence
  source: /note="Description of Artificial Sequence: Synthetic polypeptide"
EVQLVESGGGLVQPGNSLRLSCAASGFTFSKFGMSWVRQAPGKGLEWVSSISGSGRDTLYAESVKGRFTISRDNAKTTLYLQMNSLRPEDTAVYYCTIGGSLSVSSQGTLVTVSSSGGPGPAGMKGLPGSTFKFYMPKKATELKHLQCLEEELKPLEEVLNLAQSKNFHLRPRDLISNINVIVLELKGSETTFMCEYADETATIVEFLNRWITFCQSIISTLTGGSSSTKKTQLQLEHLLLDLQMILNGINNYKNPKLTRMLSGGPGPAGMKGLPGSEVQLVESGGGLVQPGNSLRLSCAASGFTFSKFGMSWVRQAPGKGLEWVSSISGSGRDTLYAESVKGRFTISRDNAKTTLYLQMNSLRPEDTAVYYCTIGGSLSVSSQGTLVTVSSGGGGSGGGGSGGGGSGGGGSGGGGSGGGGSSGGPGPAGMKGLPGSEVQLVESGGGLVQPGGSLRLSCAASGFTFSSYTLAWVRQAPGKGLEWVAAIDSSSYTYSPDTVRGRFTISRDNAKNSLYLQMNSLRAEDTAVYYCARDSNWDALDYWGQGTTVTVSSGGGGSGGGGSGGGGSDIQMTQSPSSLSASVGDRVTITCKASQNVGTNVGWYQQKPGKAPKALIYSASFRYSGVPSRFSGSGSGTDFTLTISSLQPEDFATYYCQQYYTYPYTFGGGTKVEIKHHHHHH

SEQ ID NO: 387 - protein, 682 aa, Artificial Sequence
  source: /note="Description of Artificial Sequence: Synthetic polypeptide"
EVQLVESGGGLVQPGGSLRLSCAASGFTFSSYTLAWVRQAPGKGLEWVAAIDSSSYTYSPDTVRGRFTISRDNAKNSLYLQMNSLRAEDTAVYYCARDSNWDALDYWGQGTTVTVSSGGGGSGGGGSGGGGSDIQMTQSPSSLSASVGDRVTITCKASQNVGTNVGWYQQKPGKAPKALIYSASFRYSGVPSRFSGSGSGTDFTLTISSLQPEDFATYYCQQYYTYPYTFGGGTKVEIKSGGPGPAGMKGLPGSGGGGSGGGGSGGGGSGGGGSGGGGSGGGGSEVQLVESGGGLVQPGNSLRLSCAASGFTFSKFGMSWVRQAPGKGLEWVSSISGSGRDTLYAESVKGRFTISRDNAKTTLYLQMNSLRPEDTAVYYCTIGGSLSVSSQGTLVTVSSSGGPGPAGMKGLPGSTFKFYMPKKATELKHLQCLEEELKPLEEVLNLAQSKNFHLRPRDLISNINVIVLELKGSETTFMCEYADETATIVEFLNRWITFCQSIISTLTGGSSSTKKTQLQLEHLLLDLQMILNGINNYKNPKLTRMLSGGPGPAGMKGLPGSEVQLVESGGGLVQPGNSLRLSCAASGFTFSKFGMSWVRQAPGKGLEWVSSISGSGRDTLYAESVKGRFTISRDNAKTTLYLQMNSLRPEDTAVYYCTIGGSLSVSSQGTLVTVSSHHHHHH

SEQ ID NO: 388 - protein, 553 aa, Artificial Sequence
  source: /note="Description of Artificial Sequence: Synthetic polypeptide"
APTSSSTKKTQLQLEHLLLDLQMILNGINNYKNPKLTRMLTFKFYMPKKATELKHLQCLEEELKPLEEVLNLAQSKNFHLRPRDLISNINVIVLELKGSETTFMCEYADETATIVEFLNRWITFCQSIISTLTSGGPGPAGMKGLPGSEVQLVESGGGLVQPGNSLRLSCAASGFTFSKFGMSWVRQAPGKGLEWVSSISGSGRDTLYAESVKGRFTISRDNAKTTLYLQMNSLRPEDTAVYYCTIGGSLSVSSQGTLVTVSSGGGGSGGGGSGGGGSGGGGSGGGGSGGGGSSGGPGPAGMKGLPGSEVQLVESGGGLVQPGGSLRLSCAASGFTFSSYTLAWVRQAPGKGLEWVAAIDSSSYTYSPDTVRGRFTISRDNAKNSLYLQMNSLRAEDTAVYYCARDSNWDALDYWGQGTTVTVSSGGGGSGGGGSGGGGSDIQMTQSPSSLSASVGDRVTITCKASQNVGTNVGWYQQKPGKAPKSLIYSASFRYSGVPSRFSGSGSGTDFTLTISSLQPEDFATYYCQQYYTYPYTFGGGTKVEIKHHHHHH

SEQ ID NO: 389 - protein, 553 aa, Artificial Sequence
  source: /note="Description of Artificial Sequence: Synthetic polypeptide"
APTSSSTKKTQLQLEHLLLDLQMILNGINNYKNPKLTRMLTFKFYMPKKATELKHLQCLEEELKPLEEVLNLAQSKNFHLRPRDLISNINVIVLELKGSETTFMCEYADETATIVEFLNRWITFCQSIISTLTSGGPGPAGMKGLPGSEVQLVESGGGLVQPGNSLRLSCAASGFTFSKFGMSWVRQAPGKGLEWVSSISGSGRDTLYAESVKGRFTISRDNAKTTLYLQMNSLRPEDTAVYYCTIGGSLSVSSQGTLVTVSSGGGGSGGGGSGGGGSGGGGSGGGGSGGGGSSGGPGPAGMKGLPGSEVQLVESGGGLVQPGGSLRLSCAASGFTFSSYTLAWVRQAPGKGLEWVAAIDSSSYTYSPDTVRGRFTISRDNAKNSLYLQMNSLRAEDTAVYYCARDSNWDALDYWGQGTTVTVSSGGGGSGGGGSGGGGSDIQMTQSPSSLSASVGDRVTITCKASQNVGTNVGWYQQKPGQAPRLLIYSASFRYSGVPSRFSGSGSGTDFTLTISSLQPEDFATYYCQQYYTYPYTFGGGTKVEIKHHHHHH

SEQ ID NO: 390 - protein, 667 aa, Artificial Sequence
  source: /note="Description of Artificial Sequence: Synthetic polypeptide"
APTSSSTKKTQLQLEHLLLDLQMILNGINNYKNPKLTRMLTFKFYMPKKATELKHLQCLEEELKPLEEVLNLAQSKNFHLRPRDLISNINVIVLELKGSETTFMCEYADETATIVEFLNRWITFCQSIISTLTSGGPGPAGMKGLPGSESKYGPPCPPCPAPEFLGGPSVFLFPPKPKDTLMISRTPEVTCVVVDVSQEDPEVQFNWYVDGVEVHNAKTKPREEQFNSTYRVVSVLTVLHQDWLNGKEYKCKVSNKGLPSSIEKTISKAKGQPREPQVYTLPPSQEEMTKNQVSLTCLVKGFYPSDIAVEWESNGQPENNYKTTPPVLDSDGSFFLYSRLTVDKSRWQEGNVFSCSVMHEALHNHYTQKSLSLSLGKGGGGSGGGGSGGGGSGGGGSGGGGSGGGGSSGGPGPAGMKGLPGSEVQLVESGGGLVQPGGSLRLSCAASGFTFSSYTLAWVRQAPGKGLEWVAAIDSSSYTYSPDTVRGRFTISRDNAKNSLYLQMNSLRAEDTAVYYCARDSNWDALDYWGQGTTVTVSSGGGGSGGGGSGGGGSDIQMTQSPSSLSASVGDRVTITCKASQNVGTNVGWYQQKPGKAPKALIYSASFRYSGVPSRFSGSGSGTDFTLTISSLQPEDFATYYCQQYYTYPYTFGGGTKVEIKHHHHHH

SEQ ID NO: 391 - protein, 667 aa, Artificial Sequence
  source: /note="Description of Artificial Sequence: Synthetic polypeptide"
ESKYGPPCPPCPAPEFLGGPSVFLFPPKPKDTLMISRTPEVTCVVVDVSQEDPEVQFNWYVDGVEVHNAKTKPREEQFNSTYRVVSVLTVLHQDWLNGKEYKCKVSNKGLPSSIEKTISKAKGQPREPQVYTLPPSQEEMTKNQVSLTCLVKGFYPSDIAVEWESNGQPENNYKTTPPVLDSDGSFFLYSRLTVDKSRWQEGNVFSCSVMHEALHNHYTQKSLSLSLGKSGGPGPAGMKGLPGSAPTSSSTKKTQLQLEHLLLDLQMILNGINNYKNPKLTRMLTFKFYMPKKATELKHLQCLEEELKPLEEVLNLAQSKNFHLRPRDLISNINVIVLELKGSETTFMCEYADETATIVEFLNRWITFCQSIISTLTGGGGSGGGGSGGGGSGGGGSGGGGSGGGGSSGGPGPAGMKGLPGSEVQLVESGGGLVQPGGSLRLSCAASGFTFSSYTLAWVRQAPGKGLEWVAAIDSSSYTYSPDTVRGRFTISRDNAKNSLYLQMNSLRAEDTAVYYCARDSNWDALDYWGQGTTVTVSSGGGGSGGGGSGGGGSDIQMTQSPSSLSASVGDRVTITCKASQNVGTNVGWYQQKPGKAPKALIYSASFRYSGVPSRFSGSGSGTDFTLTISSLQPEDFATYYCQQYYTYPYTFGGGTKVEIKHHHHHH

SEQ ID NO: 392 - protein, 667 aa, Artificial Sequence
  source: /note="Description of Artificial Sequence: Synthetic polypeptide"
APTSSSTKKTQLQLEHLLLDLQMILNGINNYKNPKLTRMLTFKFYMPKKATELKHLQCLEEELKPLEEVLNLAQSKNFHLRPRDLISNINVIVLELKGSETTFMCEYADETATIVEFLNRWITFCQSIISTLTSGGPGPAGMKGLPGSGGGGSGGGGSGGGGSGGGGSGGGGSGGGGSEVQLVESGGGLVQPGGSLRLSCAASGFTFSSYTLAWVRQAPGKGLEWVAAIDSSSYTYSPDTVRGRFTISRDNAKNSLYLQMNSLRAEDTAVYYCARDSNWDALDYWGQGTTVTVSSGGGGSGGGGSGGGGSDIQMTQSPSSLSASVGDRVTITCKASQNVGTNVGWYQQKPGKAPKALIYSASFRYSGVPSRFSGSGSGTDFTLTISSLQPEDFATYYCQQYYTYPYTFGGGTKVEIKSGGPGPAGMKGLPGSESKYGPPCPPCPAPEFLGGPSVFLFPPKPKDTLMISRTPEVTCVVVDVSQEDPEVQFNWYVDGVEVHNAKTKPREEQFNSTYRVVSVLTVLHQDWLNGKEYKCKVSNKGLPSSIEKTISKAKGQPREPQVYTLPPSQEEMTKNQVSLTCLVKGFYPSDIAVEWESNGQPENNYKTTPPVLDSDGSFFLYSRLTVDKSRWQEGNVFSCSVMHEALHNHYTQKSLSLSLGKHHHHHH

SEQ ID NO: 393 - protein, 665 aa, Artificial Sequence
  source: /note="Description of Artificial Sequence: Synthetic polypeptide"
VPRDCGCKPCICTVPEVSSVFIFPPKPKDVLTITLTPKVTCVVVDISKDDPEVQFSWFVDDVEVHTAQTQPREEQFNSTFRSVSELPIMHQDWLNGKEFKCRVNSAAFPAPIEKTISKTKGRPKAPQVYTIPPPKEQMAKDKVSLTCMITDFFPEDITVEWQWNGQPAENYKNTQPIMDTDGSYFVYSKLNVQKSNWEAGNTFTCSVLHEGLHNHHTEKSLSHSPGKSGGPGPAGMKGLPGSAPTSSSTKKTQLQLEHLLLDLQMILNGINNYKNPKLTRMLTFKFYMPKKATELKHLQCLEEELKPLEEVLNLAQSKNFHLRPRDLISNINVIVLELKGSETTFMCEYADETATIVEFLNRWITFCQSIISTLTGGGGSGGGGSGGGGSGGGGSGGGGSGGGGSSGGPGPAGMKGLPGSEVQLVESGGGLVQPGGSLRLSCAASGFTFSSYTLAWVRQAPGKGLEWVAAIDSSSYTYSPDTVRGRFTISRDNAKNSLYLQMNSLRAEDTAVYYCARDSNWDALDYWGQGTTVTVSSGGGGSGGGGSGGGGSDIQMTQSPSSLSASVGDRVTITCKASQNVGTNVGWYQQKPGKAPKALIYSASFRYSGVPSRFSGSGSGTDFTLTISSLQPEDFATYYCQQYYTYPYTFGGGTKVEIKHHHHHH

SEQ ID NO: 394 - protein, 547 aa, Artificial Sequence
  source: /note="Description of Artificial Sequence: Synthetic polypeptide"
APTSSSTKKTQLQLEHLLLDLQMILNGINNYKNPKLTRMLTFKFYMPKKATELKHLQCLEEELKPLEEVLNLAQSKNFHLRPRDLISNINVIVLELKGSETTFMCEYADETATIVEFLNRWITFCQSIISTLTSGGPGPAGLYAQPGSEVQLVESGGGLVQPGNSLRLSCAASGFTFSKFGMSWVRQAPGKGLEWVSSISGSGRDTLYAESVKGRFTISRDNAKTTLYLQMNSLRPEDTAVYYCTIGGSLSVSSQGTLVTVSSGGGGSGGGGSGGGGSGGGGSGGGGSGGGGSSGGPGPAGLYAQPGSEVQLVESGGGLVQPGGSLRLSCAASGFTFSSYTLAWVRQAPGKGLEWVAAIDSSSYTYSPDTVRGRFTISRDNAKNSLYLQMNSLRAEDTAVYYCARDSNWDALDYWGQGTTVTVSSSGGPGPAGLYAQPGSDIQMTQSPSSLSASVGDRVTITCKAREKLWSAVAWYQQKPGKAPKSLIYSASFRYSGVPSRFSGSGSGTDFTLTISSLQPEDFATYYCQQYYTYPYTFGGGTKVEIK

SEQ ID NO: 395 - protein, 547 aa, Artificial Sequence
  source: /note="Description of Artificial Sequence: Synthetic polypeptide"
APTSSSTKKTQLQLEHLLLDLQMILNGINNYKNPKLTRMLTFKFYMPKKATELKHLQCLEEELKPLEEVLNLAQSKNFHLRPRDLISNINVIVLELKGSETTFMCEYADETATIVEFLNRWITFCQSIISTLTSGGPGPAGLYAQPGSEVQLVESGGGLVQPGNSLRLSCAASGFTFSKFGMSWVRQAPGKGLEWVSSISGSGRDTLYAESVKGRFTISRDNAKTTLYLQMNSLRPEDTAVYYCTIGGSLSVSSQGTLVTVSSGGGGSGGGGSGGGGSGGGGSGGGGSGGGGSSGGPGPAGLYAQPGSEVQLVESGGGLVQPGGSLRLSCAASGFTFSSYTLAWVRQAPGKGLEWVAAIDSSSYTYSPDTVRGRFTISRDNAKNSLYLQMNSLRAEDTAVYYCARDSNWDALDYWGQGTTVTVSSGGGGSGGGGSGGGGSDIQMTQSPSSLSASVGDRVTITCKAREKLWSAVAWYQQKPGKAPKSLIYSASFRYSGVPSRFSGSGSGTDFTLTISSLQPEDFATYYCQQYYTYPYTFGGGTKVEIK

SEQ ID NO: 396 - protein, 547 aa, Artificial Sequence
  source: /note="Description of Artificial Sequence: Synthetic polypeptide"
APTSSSTKKTQLQLEHLLLDLQMILNGINNYKNPKLTRMLTFKFYMPKKATELKHLQCLEEELKPLEEVLNLAQSKNFHLRPRDLISNINVIVLELKGSETTFMCEYADETATIVEFLNRWITFCQSIISTLTSGGPGPAGLYAQPGSEVQLVESGGGLVQPGNSLRLSCAASGFTFSKFGMSWVRQAPGKGLEWVSSISGSGRDTLYAESVKGRFTISRDNAKTTLYLQMNSLRPEDTAVYYCTIGGSLSVSSQGTLVTVSSGGGGSGGGGSGGGGSGGGGSGGGGSGGGGSSGGPGPAGLYAQPGSEVQLVESGGGLVQPGGSLRLSCAASGFTFSSYTLAWVRQAPGKGLEWVAAIDSSSYTYSPDTVRGRFTISRDNAKNSLYLQMNSLRAEDTAVYYCARDSNWDALDYWGQGTTVTVSSSGGPGPAGLYAQPGSDIQMTQSPSSLSASVGDRVTITCKVTEKVWGNVAWYQQKPGKAPISLIYSPSLRKSGVPSRFSGSGSGTDFTLTISSLQPEDFATYYCQQYYTYPYTFGGGTKVEIK

SEQ ID NO: 397 - protein, 547 aa, Artificial Sequence
  source: /note="Description of Artificial Sequence: Synthetic polypeptide"
APTSSSTKKTQLQLEHLLLDLQMILNGINNYKNPKLTRMLTFKFYMPKKATELKHLQCLEEELKPLEEVLNLAQSKNFHLRPRDLISNINVIVLELKGSETTFMCEYADETATIVEFLNRWITFCQSIISTLTSGGPGPAGLYAQPGSEVQLVESGGGLVQPGNSLRLSCAASGFTFSKFGMSWVRQAPGKGLEWVSSISGSGRDTLYAESVKGRFTISRDNAKTTLYLQMNSLRPEDTAVYYCTIGGSLSVSSQGTLVTVSSGGGGSGGGGSGGGGSGGGGSGGGGSGGGGSSGGPGPAGLYAQPGSEVQLVESGGGLVQPGGSLRLSCAASGFTFSSYTLAWVRQAPGKGLEWVAAIDSSSYTYSPDTVRGRFTISRDNAKNSLYLQMNSLRAEDTAVYYCARDSNWDALDYWGQGTTVTVSSGGGGSGGGGSGGGGSDIQMTQSPSSLSASVGDRVTITCKVTEKVWGNVAWYQQKPGKAPISLIYSPSLRKSGVPSRFSGSGSGTDFTLTISSLQPEDFATYYCQQYYTYPYTFGGGTKVEIK

SEQ ID NO: 398 - protein, 427 aa, Artificial Sequence
  source: /note="Description of Artificial Sequence: Synthetic polypeptide"
APTSSSTKKTQLQLEHLLLDLQMILNGINNYKNPKLTRMLTFKFYMPKKATELKHLQCLEEELKPLEEVLNLAQSKNFHLRPRDLISNINVIVLELKGSETTFMCEYADETATIVEFLNRWITFCQSIISTLTSGGPGPAGLYAQPGSEVQLVESGGGLVQPGNSLRLSCAASGFTFSKFGMSWVRQAPGKGLEWVSSISGSGRDTLYAESVKGRFTISRDNAKTTLYLQMNSLRPEDTAVYYCTIGGSLSVSSQGTLVTVSSGGGGSGGGGSGGGGSGGGGSGGGGSGGGGSSGGPGPAGLYAQPGSEVQLLESGGGLVQPGGSLRLSCAASGSIFSANAMGWYRQAPGKGLELVAVISSGGSTNYADSVKGRFTISRDNSKNTVYLQMNSLRAEDTAVYYCMYSGSYYYTPNDYWGQGTLVTVSS

SEQ ID NO: 399 - protein, 426 aa, Artificial Sequence
  source: /note="Description of Artificial Sequence: Synthetic polypeptide"
APTSSSTKKTQLQLEHLLLDLQMILNGINNYKNPKLTRMLTFKFYMPKKATELKHLQCLEEELKPLEEVLNLAQSKNFHLRPRDLISNINVIVLELKGSETTFMCEYADETATIVEFLNRWITFCQSIISTLTSGGPGPAGLYAQPGSEVQLVESGGGLVQPGNSLRLSCAASGFTFSKFGMSWVRQAPGKGLEWVSSISGSGRDTLYAESVKGRFTISRDNAKTTLYLQMNSLRPEDTAVYYCTIGGSLSVSSQGTLVTVSSGGGGSGGGGSGGGGSGGGGSGGGGSGGGGSSGGPGPAGLYAQPGSEVQLLESGGGLVQPGGSLRLSCAASERIFSTDVMGWYRQAPGKQRELVAVVSARGTTNYLDAVKGRFTISRDNSKNTLYLQMNSLRAEDTAVYYCYVRETTSPWRIYWGQGTLVTVSS

SEQ ID NO: 400 - protein, 811 aa, Artificial Sequence
  source: /note="Description of Artificial Sequence: Synthetic polypeptide"
ELCDDDPPEIPHATFKAMAYKEGTMLNCECKRGFRRIKSGSLYMLCTGNSSHSSWDNQCQCTSSATRNTTKQVTPQPEEQKERKTTEMQSPMQPVDQASLPGHCREPPPWENEATERIYHFVVGQMVYYQCVQGYRALHRGPAESVCKMTHGKTRWTQPQLICTGEMETSQFPGEEKPQASPEGRPESETSSLVTTTDFQIQTEMAATMETSIFTTEYQGGGGSGGGGSGGGGSGGGGSGGGGSGGGGSSGGPGPAGLYAQPGSAPTSSSTKKTQLQLEHLLLDLQMILNGINNYKNPKLTRMLTFKFYMPKKATELKHLQCLEEELKPLEEVLNLAQSKNFHLRPRDLISNINVIVLELKGSETTFMCEYADETATIVEFLNRWITFCQSIISTLTSGGPGPAGLYAQPGSEVQLVESGGGLVQPGNSLRLSCAASGFTFSKFGMSWVRQAPGKGLEWVSSISGSGRDTLYAESVKGRFTISRDNAKTTLYLQMNSLRPEDTAVYYCTIGGSLSVSSQGTLVTVSSGGGGSGGGGSGGGGSGGGGSGGGGSGGGGSSGGPGPAGLYAQPGSEVQLVESGGGLVQPGGSLRLSCAASGFTFSSYTLAWVRQAPGKGLEWVAAIDSSSYTYSPDTVRGRFTISRDNAKNSLYLQMNSLRAEDTAVYYCARDSNWDALDYWGQGTTVTVSSSGGPGPAGLYAQPGSDIQMTQSPSSLSASVGDRVTITCKAREKLWSAVAWYQQKPGKAPKSLIYSASFRYSGVPSRFSGSGSGTDFTLTISSLQPEDFATYYCQQYYTYPYTFGGGTKVEIK

SEQ ID NO: 401 - protein, 811 aa, Artificial Sequence
  source: /note="Description of Artificial Sequence: Synthetic polypeptide"
ELCDDDPPEIPHATFKAMAYKEGTMLNCECKRGFRRIKSGSLYMLCTGNSSHSSWDNQCQCTSSATRNTTKQVTPQPEEQKERKTTEMQSPMQPVDQASLPGHCREPPPWENEATERIYHFVVGQMVYYQCVQGYRALHRGPAESVCKMTHGKTRWTQPQLICTGEMETSQFPGEEKPQASPEGRPESETSSLVTTTDFQIQTEMAATMETSIFTTEYQGGGGSGGGGSGGGGSGGGGSGGGGSGGGGSSGGPGPAGLYAQPGSAPTSSSTKKTQLQLEHLLLDLQMILNGINNYKNPKLTRMLTFKFYMPKKATELKHLQCLEEELKPLEEVLNLAQSKNFHLRPRDLISNINVIVLELKGSETTFMCEYADETATIVEFLNRWITFCQSIISTLTSGGPGPAGLYAQPGSEVQLVESGGGLVQPGNSLRLSCAASGFTFSKFGMSWVRQAPGKGLEWVSSISGSGRDTLYAESVKGRFTISRDNAKTTLYLQMNSLRPEDTAVYYCTIGGSLSVSSQGTLVTVSSGGGGSGGGGSGGGGSGGGGSGGGGSGGGGSSGGPGPAGLYAQPGSEVQLVESGGGLVQPGGSLRLSCAASGFTFSSYTLAWVRQAPGKGLEWVAAIDSSSYTYSPDTVRGRFTISRDNAKNSLYLQMNSLRAEDTAVYYCARDSNWDALDYWGQGTTVTVSSGGGGSGGGGSGGGGSDIQMTQSPSSLSASVGDRVTITCKAREKLWSAVAWYQQKPGKAPKSLIYSASFRYSGVPSRFSGSGSGTDFTLTISSLQPEDFATYYCQQYYTYPYTFGGGTKVEIK

SEQ ID NO: 402 - protein, 811 aa, Artificial Sequence
  source: /note="Description of Artificial Sequence: Synthetic polypeptide"
ELCDDDPPEIPHATFKAMAYKEGTMLNCECKRGFRRIKSGSLYMLCTGNSSHSSWDNQCQCTSSATRNTTKQVTPQPEEQKERKTTEMQSPMQPVDQASLPGHCREPPPWENEATERIYHFVVGQMVYYQCVQGYRALHRGPAESVCKMTHGKTRWTQPQLICTGEMETSQFPGEEKPQASPEGRPESETSSLVTTTDFQIQTEMAATMETSIFTTEYQGGGGSGGGGSGGGGSGGGGSGGGGSGGGGSSGGPGPAGLYAQPGSAPTSSSTKKTQLQLEHLLLDLQMILNGINNYKNPKLTRMLTFKFYMPKKATELKHLQCLEEELKPLEEVLNLAQSKNFHLRPRDLISNINVIVLELKGSETTFMCEYADETATIVEFLNRWITFCQSIISTLTSGGPGPAGLYAQPGSEVQLVESGGGLVQPGNSLRLSCAASGFTFSKFGMSWVRQAPGKGLEWVSSISGSGRDTLYAESVKGRFTISRDNAKTTLYLQMNSLRPEDTAVYYCTIGGSLSVSSQGTLVTVSSGGGGSGGGGSGGGGSGGGGSGGGGSGGGGSSGGPGPAGLYAQPGSEVQLVESGGGLVQPGGSLRLSCAASGFTFSSYTLAWVRQAPGKGLEWVAAIDSSSYTYSPDTVRGRFTISRDNAKNSLYLQMNSLRAEDTAVYYCARDSNWDALDYWGQGTTVTVSSSGGPGPAGLYAQPGSDIQMTQSPSSLSASVGDRVTITCKVTEKVWGNVAWYQQKPGKAPISLIYSPSLRKSGVPSRFSGSGSGTDFTLTISSLQPEDFATYYCQQYYTYPYTFGGGTKVEIK

SEQ ID NO: 403 - protein, 811 aa, Artificial Sequence
  source: /note="Description of Artificial Sequence: Synthetic polypeptide"
ELCDDDPPEIPHATFKAMAYKEGTMLNCECKRGFRRIKSGSLYMLCTGNSSHSSWDNQCQCTSSATRNTTKQVTPQPEEQKERKTTEMQSPMQPVDQASLPGHCREPPPWENEATERIYHFVVGQMVYYQCVQGYRALHRGPAESVCKMTHGKTRWTQPQLICTGEMETSQFPGEEKPQASPEGRPESETSSLVTTTDFQIQTEMAATMETSIFTTEYQGGGGSGGGGSGGGGSGGGGSGGGGSGGGGSSGGPGPAGLYAQPGSAPTSSSTKKTQLQLEHLLLDLQMILNGINNYKNPKLTRMLTFKFYMPKKATELKHLQCLEEELKPLEEVLNLAQSKNFHLRPRDLISNINVIVLELKGSETTFMCEYADETATIVEFLNRWITFCQSIISTLTSGGPGPAGLYAQPGSEVQLVESGGGLVQPGNSLRLSCAASGFTFSKFGMSWVRQAPGKGLEWVSSISGSGRDTLYAESVKGRFTISRDNAKTTLYLQMNSLRPEDTAVYYCTIGGSLSVSSQGTLVTVSSGGGGSGGGGSGGGGSGGGGSGGGGSGGGGSSGGPGPAGLYAQPGSEVQLVESGGGLVQPGGSLRLSCAASGFTFSSYTLAWVRQAPGKGLEWVAAIDSSSYTYSPDTVRGRFTISRDNAKNSLYLQMNSLRAEDTAVYYCARDSNWDALDYWGQGTTVTVSSGGGGSGGGGSGGGGSDIQMTQSPSSLSASVGDRVTITCKVTEKVWGNVAWYQQKPGKAPISLIYSPSLRKSGVPSRFSGSGSGTDFTLTISSLQPEDFATYYCQQYYTYPYTFGGGTKVEIK

SEQ ID NO: 404 - protein, 691 aa, Artificial Sequence
  source: /note="Description of Artificial Sequence: Synthetic polypeptide"
ELCDDDPPEIPHATFKAMAYKEGTMLNCECKRGFRRIKSGSLYMLCTGNSSHSSWDNQCQCTSSATRNTTKQVTPQPEEQKERKTTEMQSPMQPVDQASLPGHCREPPPWENEATERIYHFVVGQMVYYQCVQGYRALHRGPAESVCKMTHGKTRWTQPQLICTGEMETSQFPGEEKPQASPEGRPESETSSLVTTTDFQIQTEMAATMETSIFTTEYQGGGGSGGGGSGGGGSGGGGSGGGGSGGGGSSGGPGPAGLYAQPGSAPTSSSTKKTQLQLEHLLLDLQMILNGINNYKNPKLTRMLTFKFYMPKKATELKHLQCLEEELKPLEEVLNLAQSKNFHLRPRDLISNINVIVLELKGSETTFMCEYADETATIVEFLNRWITFCQSIISTLTSGGPGPAGLYAQPGSEVQLVESGGGLVQPGNSLRLSCAASGFTFSKFGMSWVRQAPGKGLEWVSSISGSGRDTLYAESVKGRFTISRDNAKTTLYLQMNSLRPEDTAVYYCTIGGSLSVSSQGTLVTVSSGGGGSGGGGSGGGGSGGGGSGGGGSGGGGSSGGPGPAGLYAQPGSEVQLLESGGGLVQPGGSLRLSCAASGSIFSANAMGWYRQAPGKGLELVAVISSGGSTNYADSVKGRFTISRDNSKNTVYLQMNSLRAEDTAVYYCMYSGSYYYTPNDYWGQGTLVTVSS

SEQ ID NO: 405 - protein, 690 aa, Artificial Sequence
  source: /note="Description of Artificial Sequence: Synthetic polypeptide"
ELCDDDPPEIPHATFKAMAYKEGTMLNCECKRGFRRIKSGSLYMLCTGNSSHSSWDNQCQCTSSATRNTTKQVTPQPEEQKERKTTEMQSPMQPVDQASLPGHCREPPPWENEATERIYHFVVGQMVYYQCVQGYRALHRGPAESVCKMTHGKTRWTQPQLICTGEMETSQFPGEEKPQASPEGRPESETSSLVTTTDFQIQTEMAATMETSIFTTEYQGGGGSGGGGSGGGGSGGGGSGGGGSGGGGSSGGPGPAGLYAQPGSAPTSSSTKKTQLQLEHLLLDLQMILNGINNYKNPKLTRMLTFKFYMPKKATELKHLQCLEEELKPLEEVLNLAQSKNFHLRPRDLISNINVIVLELKGSETTFMCEYADETATIVEFLNRWITFCQSIISTLTSGGPGPAGLYAQPGSEVQLVESGGGLVQPGNSLRLSCAASGFTFSKFGMSWVRQAPGKGLEWVSSISGSGRDTLYAESVKGRFTISRDNAKTTLYLQMNSLRPEDTAVYYCTIGGSLSVSSQGTLVTVSSGGGGSGGGGSGGGGSGGGGSGGGGSGGGGSSGGPGPAGLYAQPGSEVQLLESGGGLVQPGGSLRLSCAASERIFSTDVMGWYRQAPGKQRELVAVVSARGTTNYLDAVKGRFTISRDNSKNTLYLQMNSLRAEDTAVYYCYVRETTSPWRIYWGQGTLVTVSS

SEQ ID NO: 406 - protein, 661 aa, Artificial Sequence
  source: /note="Description of Artificial Sequence: Synthetic polypeptide"
ESKYGPPCPPCPAPEFLGGPSVFLFPPKPKDTLMISRTPEVTCVVVDVSQEDPEVQFNWYVDGVEVHNAKTKPREEQFNSTYRVVSVLTVLHQDWLNGKEYKCKVSNKGLPSSIEKTISKAKGQPREPQVYTLPPSQEEMTKNQVSLTCLVKGFYPSDIAVEWESNGQPENNYKTTPPVLDSDGSFFLYSRLTVDKSRWQEGNVFSCSVMHEALHNHYTQKSLSLSLGKSGGPGPAGLYAQPGSAPTSSSTKKTQLQLEHLLLDLQMILNGINNYKNPKLTRMLTFKFYMPKKATELKHLQCLEEELKPLEEVLNLAQSKNFHLRPRDLISNINVIVLELKGSETTFMCEYADETATIVEFLNRWITFCQSIISTLTGGGGSGGGGSGGGGSGGGGSGGGGSGGGGSSGGPGPAGLYAQPGSEVQLVESGGGLVQPGGSLRLSCAASGFTFSSYTLAWVRQAPGKGLEWVAAIDSSSYTYSPDTVRGRFTISRDNAKNSLYLQMNSLRAEDTAVYYCARDSNWDALDYWGQGTTVTVSSSGGPGPAGLYAQPGSDIQMTQSPSSLSASVGDRVTITCKAREKLWSAVAWYQQKPGKAPKSLIYSASFRYSGVPSRFSGSGSGTDFTLTISSLQPEDFATYYCQQYYTYPYTFGGGTKVEIK

SEQ ID NO: 407 - protein, 661 aa, Artificial Sequence
  source: /note="Description of Artificial Sequence: Synthetic polypeptide"
ESKYGPPCPPCPAPEFLGGPSVFLFPPKPKDTLMISRTPEVTCVVVDVSQEDPEVQFNWYVDGVEVHNAKTKPREEQFNSTYRVVSVLTVLHQDWLNGKEYKCKVSNKGLPSSIEKTISKAKGQPREPQVYTLPPSQEEMTKNQVSLTCLVKGFYPSDIAVEWESNGQPENNYKTTPPVLDSDGSFFLYSRLTVDKSRWQEGNVFSCSVMHEALHNHYTQKSLSLSLGKSGGPGPAGLYAQPGSAPTSSSTKKTQLQLEHLLLDLQMILNGINNYKNPKLTRMLTFKFYMPKKATELKHLQCLEEELKPLEEVLNLAQSKNFHLRPRDLISNINVIVLELKGSETTFMCEYADETATIVEFLNRWITFCQSIISTLTGGGGSGGGGSGGGGSGGGGSGGGGSGGGGSSGGPGPAGLYAQPGSEVQLVESGGGLVQPGGSLRLSCAASGFTFSSYTLAWVRQAPGKGLEWVAAIDSSSYTYSPDTVRGRFTISRDNAKNSLYLQMNSLRAEDTAVYYCARDSNWDALDYWGQGTTVTVSSGGGGSGGGGSGGGGSDIQMTQSPSSLSASVGDRVTITCKAREKLWSAVAWYQQKPGKAPKSLIYSASFRYSGVPSRFSGSGSGTDFTLTISSLQPEDFATYYCQQYYTYPYTFGGGTKVEIK

SEQ ID NO: 408 - protein, 661 aa, Artificial Sequence
  source: /note="Description of Artificial Sequence: Synthetic polypeptide"
ESKYGPPCPPCPAPEFLGGPSVFLFPPKPKDTLMISRTPEVTCVVVDVSQEDPEVQFNWYVDGVEVHNAKTKPREEQFNSTYRVVSVLTVLHQDWLNGKEYKCKVSNKGLPSSIEKTISKAKGQPREPQVYTLPPSQEEMTKNQVSLTCLVKGFYPSDIAVEWESNGQPENNYKTTPPVLDSDGSFFLYSRLTVDKSRWQEGNVFSCSVMHEALHNHYTQKSLSLSLGKSGGPGPAGLYAQPGSAPTSSSTKKTQLQLEHLLLDLQMILNGINNYKNPKLTRMLTFKFYMPKKATELKHLQCLEEELKPLEEVLNLAQSKNFHLRPRDLISNINVIVLELKGSETTFMCEYADETATIVEFLNRWITFCQSIISTLTGGGGSGGGGSGGGGSGGGGSGGGGSGGGGSSGGPGPAGLYAQPGSEVQLVESGGGLVQPGGSLRLSCAASGFTFSSYTLAWVRQAPGKGLEWVAAIDSSSYTYSPDTVRGRFTISRDNAKNSLYLQMNSLRAEDTAVYYCARDSNWDALDYWGQGTTVTVSSSGGPGPAGLYAQPGSDIQMTQSPSSLSASVGDRVTITCKVTEKVWGNVAWYQQKPGKAPISLIYSPSLRKSGVPSRFSGSGSGTDFTLTISSLQPEDFATYYCQQYYTYPYTFGGGTKVEIK

SEQ ID NO: 409 - protein, 661 aa, Artificial Sequence
  source: /note="Description of Artificial Sequence: Synthetic polypeptide"
ESKYGPPCPPCPAPEFLGGPSVFLFPPKPKDTLMISRTPEVTCVVVDVSQEDPEVQFNWYVDGVEVHNAKTKPREEQFNSTYRVVSVLTVLHQDWLNGKEYKCKVSNKGLPSSIEKTISKAKGQPREPQVYTLPPSQEEMTKNQVSLTCLVKGFYPSDIAVEWESNGQPENNYKTTPPVLDSDGSFFLYSRLTVDKSRWQEGNVFSCSVMHEALHNHYTQKSLSLSLGKSGGPGPAGLYAQPGSAPTSSSTKKTQLQLEHLLLDLQMILNGINNYKNPKLTRMLTFKFYMPKKATELKHLQCLEEELKPLEEVLNLAQSKNFHLRPRDLISNINVIVLELKGSETTFMCEYADETATIVEFLNRWITFCQSIISTLTGGGGSGGGGSGGGGSGGGGSGGGGSGGGGSSGGPGPAGLYAQPGSEVQLVESGGGLVQPGGSLRLSCAASGFTFSSYTLAWVRQAPGKGLEWVAAIDSSSYTYSPDTVRGRFTISRDNAKNSLYLQMNSLRAEDTAVYYCARDSNWDALDYWGQGTTVTVSSGGGGSGGGGSGGGGSDIQMTQSPSSLSASVGDRVTITCKVTEKVWGNVAWYQQKPGKAPISLIYSPSLRKSGVPSRFSGSGSGTDFTLTISSLQPEDFATYYCQQYYTYPYTFGGGTKVEIK

SEQ ID NO: 410 - protein, 541 aa, Artificial Sequence
  source: /note="Description of Artificial Sequence: Synthetic polypeptide"
ESKYGPPCPPCPAPEFLGGPSVFLFPPKPKDTLMISRTPEVTCVVVDVSQEDPEVQFNWYVDGVEVHNAKTKPREEQFNSTYRVVSVLTVLHQDWLNGKEYKCKVSNKGLPSSIEKTISKAKGQPREPQVYTLPPSQEEMTKNQVSLTCLVKGFYPSDIAVEWESNGQPENNYKTTPPVLDSDGSFFLYSRLTVDKSRWQEGNVFSCSVMHEALHNHYTQKSLSLSLGKSGGPGPAGLYAQPGSAPTSSSTKKTQLQLEHLLLDLQMILNGINNYKNPKLTRMLTFKFYMPKKATELKHLQCLEEELKPLEEVLNLAQSKNFHLRPRDLISNINVIVLELKGSETTFMCEYADETATIVEFLNRWITFCQSIISTLTGGGGSGGGGSGGGGSGGGGSGGGGSGGGGSSGGPGPAGLYAQPGSEVQLLESGGGLVQPGGSLRLSCAASGSIFSANAMGWYRQAPGKGLELVAVISSGGSTNYADSVKGRFTISRDNSKNTVYLQMNSLRAEDTAVYYCMYSGSYYYTPNDYWGQGTLVTVSS

SEQ ID NO: 411 - protein, 540 aa, Artificial Sequence
  source: /note="Description of Artificial Sequence: Synthetic polypeptide"
ESKYGPPCPPCPAPEFLGGPSVFLFPPKPKDTLMISRTPEVTCVVVDVSQEDPEVQFNWYVDGVEVHNAKTKPREEQFNSTYRVVSVLTVLHQDWLNGKEYKCKVSNKGLPSSIEKTISKAKGQPREPQVYTLPPSQEEMTKNQVSLTCLVKGFYPSDIAVEWESNGQPENNYKTTPPVLDSDGSFFLYSRLTVDKSRWQEGNVFSCSVMHEALHNHYTQKSLSLSLGKSGGPGPAGLYAQPGSAPTSSSTKKTQLQLEHLLLDLQMILNGINNYKNPKLTRMLTFKFYMPKKATELKHLQCLEEELKPLEEVLNLAQSKNFHLRPRDLISNINVIVLELKGSETTFMCEYADETATIVEFLNRWITFCQSIISTLTGGGGSGGGGSGGGGSGGGGSGGGGSGGGGSSGGPGPAGLYAQPGSEVQLLESGGGLVQPGGSLRLSCAASERIFSTDVMGWYRQAPGKQRELVAVVSARGTTNYLDAVKGRFTISRDNSKNTLYLQMNSLRAEDTAVYYCYVRETTSPWRIYWGQGTLVTVSS

SEQ ID NO: 412 - protein, 925 aa, Artificial Sequence
  source: /note="Description of Artificial Sequence: Synthetic polypeptide"
ESKYGPPCPPCPAPEFLGGPSVFLFPPKPKDTLMISRTPEVTCVVVDVSQEDPEVQFNWYVDGVEVHNAKTKPREEQFNSTYRVVSVLTVLHQDWLNGKEYKCKVSNKGLPSSIEKTISKAKGQPREPQVYTLPPSQEEMTKNQVSLTCLVKGFYPSDIAVEWESNGQPENNYKTTPPVLDSDGSFFLYSRLTVDKSRWQEGNVFSCSVMHEALHNHYTQKSLSLSLGKSGGPGPAGLYAQPGSELCDDDPPEIPHATFKAMAYKEGTMLNCECKRGFRRIKSGSLYMLCTGNSSHSSWDNQCQCTSSATRNTTKQVTPQPEEQKERKTTEMQSPMQPVDQASLPGHCREPPPWENEATERIYHFVVGQMVYYQCVQGYRALHRGPAESVCKMTHGKTRWTQPQLICTGEMETSQFPGEEKPQASPEGRPESETSSLVTTTDFQIQTEMAATMETSIFTTEYQGGGGSGGGGSGGGGSGGGGSGGGGSGGGGSSGGPGPAGLYAQPGSAPTSSSTKKTQLQLEHLLLDLQMILNGINNYKNPKLTRMLTFKFYMPKKATELKHLQCLEEELKPLEEVLNLAQSKNFHLRPRDLISNINVIVLELKGSETTFMCEYADETATIVEFLNRWITFCQSIISTLTGGGGSGGGGSGGGGSGGGGSGGGGSGGGGSSGGPGPAGLYAQPGSEVQLVESGGGLVQPGGSLRLSCAASGFTFSSYTLAWVRQAPGKGLEWVAAIDSSSYTYSPDTVRGRFTISRDNAKNSLYLQMNSLRAEDTAVYYCARDSNWDALDYWGQGTTVTVSSSGGPGPAGLYAQPGSDIQMTQSPSSLSASVGDRVTITCKAREKLWSAVAWYQQKPGKAPKSLIYSASFRYSGVPSRFSGSGSGTDFTLTISSLQPEDFATYYCQQYYTYPYTFGGGTKVEIK

SEQ ID NO: 413 - protein, 925 aa, Artificial Sequence
  source: /note="Description of Artificial Sequence: Synthetic polypeptide"
ESKYGPPCPPCPAPEFLGGPSVFLFPPKPKDTLMISRTPEVTCVVVDVSQEDPEVQFNWYVDGVEVHNAKTKPREEQFNSTYRVVSVLTVLHQDWLNGKEYKCKVSNKGLPSSIEKTISKAKGQPREPQVYTLPPSQEEMTKNQVSLTCLVKGFYPSDIAVEWESNGQPENNYKTTPPVLDSDGSFFLYSRLTVDKSRWQEGNVFSCSVMHEALHNHYTQKSLSLSLGKSGGPGPAGLYAQPGSELCDDDPPEIPHATFKAMAYKEGTMLNCECKRGFRRIKSGSLYMLCTGNSSHSSWDNQCQCTSSATRNTTKQVTPQPEEQKERKTTEMQSPMQPVDQASLPGHCREPPPWENEATERIYHFVVGQMVYYQCVQGYRALHRGPAESVCKMTHGKTRWTQPQLICTGEMETSQFPGEEKPQASPEGRPESETSSLVTTTDFQIQTEMAATMETSIFTTEYQGGGGSGGGGSGGGGSGGGGSGGGGSGGGGSSGGPGPAGLYAQPGSAPTSSSTKKTQLQLEHLLLDLQMILNGINNYKNPKLTRMLTFKFYMPKKATELKHLQCLEEELKPLEEVLNLAQSKNFHLRPRDLISNINVIVLELKGSETTFMCEYADETATIVEFLNRWITFCQSIISTLTGGGGSGGGGSGGGGSGGGGSGGGGSGGGGSSGGPGPAGLYAQPGSEVQLVESGGGLVQPGGSLRLSCAASGFTFSSYTLAWVRQAPGKGLEWVAAIDSSSYTYSPDTVRGRFTISRDNAKNSLYLQMNSLRAEDTAVYYCARDSNWDALDYWGQGTTVTVSSGGGGSGGGGSGGGGSDIQMTQSPSSLSASVGDRVTITCKAREKLWSAVAWYQQKPGKAPKSLIYSASFRYSGVPSRFSGSGSGTDFTLTISSLQPEDFATYYCQQYYTYPYTFGGGTKVEIK

SEQ ID NO: 414 - protein, 925 aa, Artificial Sequence
  source: /note="Description of Artificial Sequence: Synthetic polypeptide"
ESKYGPPCPPCPAPEFLGGPSVFLFPPKPKDTLMISRTPEVTCVVVDVSQEDPEVQFNWYVDGVEVHNAKTKPREEQFNSTYRVVSVLTVLHQDWLNGKEYKCKVSNKGLPSSIEKTISKAKGQPREPQVYTLPPSQEEMTKNQVSLTCLVKGFYPSDIAVEWESNGQPENNYKTTPPVLDSDGSFFLYSRLTVDKSRWQEGNVFSCSVMHEALHNHYTQKSLSLSLGKSGGPGPAGLYAQPGSELCDDDPPEIPHATFKAMAYKEGTMLNCECKRGFRRIKSGSLYMLCTGNSSHSSWDNQCQCTSSATRNTTKQVTPQPEEQKERKTTEMQSPMQPVDQASLPGHCREPPPWENEATERIYHFVVGQMVYYQCVQGYRALHRGPAESVCKMTHGKTRWTQPQLICTGEMETSQFPGEEKPQASPEGRPESETSSLVTTTDFQIQTEMAATMETSIFTTEYQGGGGSGGGGSGGGGSGGGGSGGGGSGGGGSSGGPGPAGLYAQPGSAPTSSSTKKTQLQLEHLLLDLQMILNGINNYKNPKLTRMLTFKFYMPKKATELKHLQCLEEELKPLEEVLNLAQSKNFHLRPRDLISNINVIVLELKGSETTFMCEYADETATIVEFLNRWITFCQSIISTLTGGGGSGGGGSGGGGSGGGGSGGGGSGGGGSSGGPGPAGLYAQPGSEVQLVESGGGLVQPGGSLRLSCAASGFTFSSYTLAWVRQAPGKGLEWVAAIDSSSYTYSPDTVRGRFTISRDNAKNSLYLQMNSLRAEDTAVYYCARDSNWDALDYWGQGTTVTVSSSGGPGPAGLYAQPGSDIQMTQSPSSLSASVGDRVTITCKVTEKVWGNVAWYQQKPGKAPISLIYSPSLRKSGVPSRFSGSGSGTDFTLTISSLQPEDFATYYCQQYYTYPYTFGGGTKVEIK

SEQ ID NO: 415 - protein, 925 aa, Artificial Sequence
  source: /note="Description of Artificial Sequence: Synthetic polypeptide"
ESKYGPPCPPCPAPEFLGGPSVFLFPPKPKDTLMISRTPEVTCVVVDVSQEDPEVQFNWYVDGVEVHNAKTKPREEQFNSTYRVVSVLTVLHQDWLNGKEYKCKVSNKGLPSSIEKTISKAKGQPREPQVYTLPPSQEEMTKNQVSLTCLVKGFYPSDIAVEWESNGQPENNYKTTPPVLDSDGSFFLYSRLTVDKSRWQEGNVFSCSVMHEALHNHYTQKSLSLSLGKSGGPGPAGLYAQPGSELCDDDPPEIPHATFKAMAYKEGTMLNCECKRGFRRIKSGSLYMLCTGNSSHSSWDNQCQCTSSATRNTTKQVTPQPEEQKERKTTEMQSPMQPVDQASLPGHCREPPPWENEATERIYHFVVGQMVYYQCVQGYRALHRGPAESVCKMTHGKTRWTQPQLICTGEMETSQFPGEEKPQASPEGRPESETSSLVTTTDFQIQTEMAATMETSIFTTEYQGGGGSGGGGSGGGGSGGGGSGGGGSGGGGSSGGPGPAGLYAQPGSAPTSSSTKKTQLQLEHLLLDLQMILNGINNYKNPKLTRMLTFKFYMPKKATELKHLQCLEEELKPLEEVLNLAQSKNFHLRPRDLISNINVIVLELKGSETTFMCEYADETATIVEFLNRWITFCQSIISTLTGGGGSGGGGSGGGGSGGGGSGGGGSGGGGSSGGPGPAGLYAQPGSEVQLVESGGGLVQPGGSLRLSCAASGFTFSSYTLAWVRQAPGKGLEWVAAIDSSSYTYSPDTVRGRFTISRDNAKNSLYLQMNSLRAEDTAVYYCARDSNWDALDYWGQGTTVTVSSGGGGSGGGGSGGGGSDIQMTQSPSSLSASVGDRVTITCKVTEKVWGNVAWYQQKPGKAPISLIYSPSLRKSGVPSRFSGSGSGTDFTLTISSLQPEDFATYYCQQYYTYPYTFGGGTKVEIK

SEQ ID NO: 416 - protein, 805 aa, Artificial Sequence
  source: /note="Description of Artificial Sequence: Synthetic polypeptide"
ESKYGPPCPPCPAPEFLGGPSVFLFPPKPKDTLMISRTPEVTCVVVDVSQEDPEVQFNWYVDGVEVHNAKTKPREEQFNSTYRVVSVLTVLHQDWLNGKEYKCKVSNKGLPSSIEKTISKAKGQPREPQVYTLPPSQEEMTKNQVSLTCLVKGFYPSDIAVEWESNGQPENNYKTTPPVLDSDGSFFLYSRLTVDKSRWQEGNVFSCSVMHEALHNHYTQKSLSLSLGKSGGPGPAGLYAQPGSELCDDDPPEIPHATFKAMAYKEGTMLNCECKRGFRRIKSGSLYMLCTGNSSHSSWDNQCQCTSSATRNTTKQVTPQPEEQKERKTTEMQSPMQPVDQASLPGHCREPPPWENEATERIYHFVVGQMVYYQCVQGYRALHRGPAESVCKMTHGKTRWTQPQLICTGEMETSQFPGEEKPQASPEGRPESETSSLVTTTDFQIQTEMAATMETSIFTTEYQGGGGSGGGGSGGGGSGGGGSGGGGSGGGGSSGGPGPAGLYAQPGSAPTSSSTKKTQLQLEHLLLDLQMILNGINNYKNPKLTRMLTFKFYMPKKATELKHLQCLEEELKPLEEVLNLAQSKNFHLRPRDLISNINVIVLELKGSETTFMCEYADETATIVEFLNRWITFCQSIISTLTGGGGSGGGGSGGGGSGGGGSGGGGSGGGGSSGGPGPAGLYAQPGSEVQLLESGGGLVQPGGSLRLSCAASGSIFSANAMGWYRQAPGKGLELVAVISSGGSTNYADSVKGRFTISRDNSKNTVYLQMNSLRAEDTAVYYCMYSGSYYYTPNDYWGQGTLVTVSS

SEQ ID NO: 417 - protein, 804 aa, Artificial Sequence
  source: /note="Description of Artificial Sequence: Synthetic polypeptide"
ESKYGPPCPPCPAPEFLGGPSVFLFPPKPKDTLMISRTPEVTCVVVDVSQEDPEVQFNWYVDGVEVHNAKTKPREEQFNSTYRVVSVLTVLHQDWLNGKEYKCKVSNKGLPSSIEKTISKAKGQPREPQVYTLPPSQEEMTKNQVSLTCLVKGFYPSDIAVEWESNGQPENNYKTTPPVLDSDGSFFLYSRLTVDKSRWQEGNVFSCSVMHEALHNHYTQKSLSLSLGKSGGPGPAGLYAQPGSELCDDDPPEIPHATFKAMAYKEGTMLNCECKRGFRRIKSGSLYMLCTGNSSHSSWDNQCQCTSSATRNTTKQVTPQPEEQKERKTTEMQSPMQPVDQASLPGHCREPPPWENEATERIYHFVVGQMVYYQCVQGYRALHRGPAESVCKMTHGKTRWTQPQLICTGEMETSQFPGEEKPQASPEGRPESETSSLVTTTDFQIQTEMAATMETSIFTTEYQGGGGSGGGGSGGGGSGGGGSGGGGSGGGGSSGGPGPAGLYAQPGSAPTSSSTKKTQLQLEHLLLDLQMILNGINNYKNPKLTRMLTFKFYMPKKATELKHLQCLEEELKPLEEVLNLAQSKNFHLRPRDLISNINVIVLELKGSETTFMCEYADETATIVEFLNRWITFCQSIISTLTGGGGSGGGGSGGGGSGGGGSGGGGSGGGGSSGGPGPAGLYAQPGSEVQLLESGGGLVQPGGSLRLSCAASERIFSTDVMGWYRQAPGKQRELVAVVSARGTTNYLDAVKGRFTISRDNSKNTLYLQMNSLRAEDTAVYYCYVRETTSPWRIYWGQGTLVTVSS

SEQ ID NO: 418 - protein, 245 aa, Artificial Sequence
  source: /note="Description of Artificial Sequence: Synthetic polypeptide"
EVQLVESGGGLVQPGGSLRLSCAASGFTFSSYTLAWVRQAPGKGLEWVAAIDSSSYTYSPDTVRGRFTISRDNAKNSLYLQMNSLRAEDTAVYYCARDSNWDALDYWGQGTTVTVSSGGGGSGGGGSGGGGSDIQMTQSPSSLSASVGDRVTITCKASQNVGTNVGWYQQKPGKAPKSLIYSASFRYSGVPSRFSGSGSGTDFTLTISSLQPEDFATYYCQQYYTYPYTFGGGTKVEIKHHHHHH

SEQ ID NO: 419 - protein, 245 aa, Artificial Sequence
  source: /note="Description of Artificial Sequence: Synthetic polypeptide"
EVQLVESGGGLVQPGGSLRLSCAASGFTFSSYTLAWVRQAPGKGLEWVAAIDSSSYTYSPDTVRGRFTISRDNAKNSLYLQMNSLRAEDTAVYYCARDSNWDALDYWGQGTTVTVSSSGGPGPAGLYAQPGSDIQMTQSPSSLSASVGDRVTITCKASQNVGTNVGWYQQKPGKAPKALIYSASFRYSGVPSRFSGSGSGTDFTLTISSLQPEDFATYYCQQYYTYPYTFGGGTKVEIKHHHHHH

SEQ ID NO: 420 - protein, 245 aa, Artificial Sequence
  source: /note="Description of Artificial Sequence: Synthetic polypeptide"
EVQLVESGGGLVQPGGSLRLSCAASGFTFSSYTLAWVRQAPGKGLEWVAAIDSSSYTYSPDTVRGRFTISRDNAKNSLYLQMNSLRAEDTAVYYCARDSNWDALDYWGQGTTVTVSSSGGPGPAGLYAQPGSDIQMTQSPSSLSASVGDRVTITCKASQNVGTNVGWYQQKPGKAPKSLIYSASFRYSGVPSRFSGSGSGTDFTLTISSLQPEDFATYYCQQYYTYPYTFGGGTKVEIKHHHHHH

SEQ ID NO: 421 - protein, 612 aa, Artificial Sequence
  source: /note="Description of Artificial Sequence: Synthetic polypeptide"
LVEEPKNLVKTNCDLYEKLGEYGFQNAILVRYTQKAPQVSTPTLVEAARNLGRVGTKCCTLPEDQRLPCVEDYLSAILNRVCLLHEKTPVSEHVTKCCSGSLVERRPCFSALTVDETYVPKEFKAETFTFHSDICTLPEKEKQIKKQTALAELVKHKPKATAEQLKTVMDDFAQFLDTCCKAADKDTCFSTEGPNLVTRCKDALASGGPGPAGMKGLPGSCDLPQTHNLRNKRALTLLVQMRRLSPLSCLKDRKDFGFPQEKVDAQQIKKAQAIPVLSELTQQILNIFTSKDSSAAWNTTLLDSFCNDLHQQLNDLQGCLMQQVGVQEFPLTQEDALLAVRKYFHRITVYLREKKHSPCAWEVVRAEVWRALSSSANVLGRLREEKSGGPGPAGMKGLPGSLVEEPKNLVKTNCDLYEKLGEYGFQNAILVRYTQKAPQVSTPTLVEAARNLGRVGTKCCTLPEDQRLPCVEDYLSAILNRVCLLHEKTPVSEHVTKCCSGSLVERRPCFSALTVDETYVPKEFKAETFTFHSDICTLPEKEKQIKKQTALAELVKHKPKATAEQLKTVMDDFAQFLDTCCKAADKDTCFSTEGPNLVTRCKDALAHHHHHH

SEQ ID NO: 422 - protein, 1030 aa, Artificial Sequence
  source: /note="Description of Artificial Sequence: Synthetic polypeptide"
EAHKSEIAHRYNDLGEQHFKGLVLIAFSQYLQKCSYDEHAKLVQEVTDFAKTCVADESAANCDKSLHTLFGDKLCAIPNLRENYGELADCCTKQEPERNECFLQHKDDNPSLPPFERPEAEAMCTSFKENPTTFMGHYLHEVARRHPYFYAPELLYYAEQYNEILTQCCAEADKESCLTPKLDGVKEKALVSSVRQGGGGSGGGGSGGSLVEEPKNLVKTNCDLYEKLGEYGFQNAILVRYTQKAPQVSTPTLVEAARNLGRVGTKCCTLPEDQRLPCVEDYLSAILNRVCLLHEKTPVSEHVTKCCSGSLVERRPCFSALTVDETYVPKEFKAETFTFHSDICTLPEKEKQIKKQTALAELVKHKPKATAEQLKTVMDDFAQFLDTCCKAADKDTCFSTEGPNLVTRCKDALASGGPGPAGMKGLPGSCDLPQTHNLRNKRALTLLVQMRRLSPLSCLKDRKDFGFPQEKVDAQQIKKAQAIPVLSELTQQILNIFTSKDSSAAWNTTLLDSFCNDLHQQLNDLQGCLMQQVGVQEFPLTQEDALLAVRKYFHRITVYLREKKHSPCAWEVVRAEVWRALSSSANVLGRLREEKSGGPGPAGMKGLPGSEAHKSEIAHRYNDLGEQHFKGLVLIAFSQYLQKCSYDEHAKLVQEVTDFAKTCVADESAANCDKSLHTLFGDKLCAIPNLRENYGELADCCTKQEPERNECFLQHKDDNPSLPPFERPEAEAMCTSFKENPTTFMGHYLHEVARRHPYFYAPELLYYAEQYNEILTQCCAEADKESCLTPKLDGVKEKALVSSVRQGGGGSGGGGSGGSLVEEPKNLVKTNCDLYEKLGEYGFQNAILVRYTQKAPQVSTPTLVEAARNLGRVGTKCCTLPEDQRLPCVEDYLSAILNRVCLLHEKTPVSEHVTKCCSGSLVERRPCFSALTVDETYVPKEFKAETFTFHSDICTLPEKEKQIKKQTALAELVKHKPKATAEQLKTVMDDFAQFLDTCCKAADKDTCFSTEGPNLVTRCKDALAHHHHHH

SEQ ID NO: 423 - protein, 466 aa, Artificial Sequence
  source: /note="Description of Artificial Sequence: Synthetic polypeptide"
EVQLVESGGGLVQPGNSLRLSCAASGFTFSKFGMSWVRQAPGKGLEWVSSISGSGRDTLYAESVKGRFTISRDNAKTTLYLQMNSLRPEDTAVYYCTIGGSLSVSSQGTLVTVSSGGGGSGGGSGGPGPAGMKGLPGSGGGGSGGGSCDLPQTHNLRNKRALTLLVQMRRLSPLSCLKDRKDFGFPQEKVDAQQIKKAQAIPVLSELTQQILNIFTSKDSSAAWNTTLLDSFCNDLHQQLNDLQGCLMQQVGVQEFPLTQEDALLAVRKYFHRITVYLREKKHSPCAWEVVRAEVWRALSSSANVLGRLREEKGGGGSGGGSGGPGPAGMKGLPGSGGGGSGGGSEVQLVESGGGLVQPGNSLRLSCAASGFTFSKFGMSWVRQAPGKGLEWVSSISGSGRDTLYAESVKGRFTISRDNAKTTLYLQMNSLRPEDTAVYYCTIGGSLSVSSQGTLVTVSSHHHHHH

SEQ ID NO: 424 - protein, 426 aa, Artificial Sequence
  source: /note="Description of Artificial Sequence: Synthetic polypeptide"
EVQLVESGGGLVQPGNSLRLSCAASGFTFSKFGMSWVRQAPGKGLEWVSSISGSGRDTLYAESVKGRFTISRDNAKTTLYLQMNSLRPEDTAVYYCTIGGSLSVSSQGTLVTVSSSGGPGPAGLYAQPGSCDLPQTHNLRNKRALTLLVQMRRLSPLSCLKDRKDFGFPQEKVDAQQIKKAQAIPVLSELTQQILNIFTSKDSSAAWNTTLLDSFCNDLHQQLNDLQGCLMQQVGVQEFPLTQEDALLAVRKYFHRITVYLREKKHSPCAWEVVRAEVWRALSSSANVLGRLREEKSGGPGPAGLYAQPGSEVQLVESGGGLVQPGNSLRLSCAASGFTFSKFGMSWVRQAPGKGLEWVSSISGSGRDTLYAESVKGRFTISRDNAKTTLYLQMNSLRPEDTAVYYCTIGGSLSVSSQGTLVTVSS

SEQ ID NO: 425 - protein, 426 aa, Artificial Sequence
  source: /note="Description of Artificial Sequence: Synthetic polypeptide"
EVQLVESGGGLVQPGNSLRLSCAASGFTFSKFGMSWVRQAPGKGLEWVSSISGSGRDTLYAESVKGRFTISRDNAKTTLYLQMNSLRPEDTAVYYCTIGGSLSVSSQGTLVTVSSSGGPALFKSSFPPGSCDLPQTHNLRNKRALTLLVQMRRLSPLSCLKDRKDFGFPQEKVDAQQIKKAQAIPVLSELTQQILNIFTSKDSSAAWNTTLLDSFCNDLHQQLNDLQGCLMQQVGVQEFPLTQEDALLAVRKYFHRITVYLREKKHSPCAWEVVRAEVWRALSSSANVLGRLREEKSGGPALFKSSFPPGSEVQLVESGGGLVQPGNSLRLSCAASGFTFSKFGMSWVRQAPGKGLEWVSSISGSGRDTLYAESVKGRFTISRDNAKTTLYLQMNSLRPEDTAVYYCTIGGSLSVSSQGTLVTVSS

SEQ ID NO: 426 - protein, 428 aa, Artificial Sequence
  source: /note="Description of Artificial Sequence: Synthetic polypeptide"
EVQLVESGGGLVQPGNSLRLSCAASGFTFSKFGMSWVRQAPGKGLEWVSSISGSGRDTLYAESVKGRFTISRDNAKTTLYLQMNSLRPEDTAVYYCTIGGSLSVSSQGTLVTVSSSGGPPLAQKLKSSPGSCDLPQTHNLRNKRALTLLVQMRRLSPLSCLKDRKDFGFPQEKVDAQQIKKAQAIPVLSELTQQILNIFTSKDSSAAWNTTLLDSFCNDLHQQLNDLQGCLMQQVGVQEFPLTQEDALLAVRKYFHRITVYLREKKHSPCAWEVVRAEVWRALSSSANVLGRLREEKSGGPPLAQKLKSSPGSEVQLVESGGGLVQPGNSLRLSCAASGFTFSKFGMSWVRQAPGKGLEWVSSISGSGRDTLYAESVKGRFTISRDNAKTTLYLQMNSLRPEDTAVYYCTIGGSLSVSSQGTLVTVSS

SEQ ID NO: 427 - protein, 425 aa, Artificial Sequence
  source: /note="Description of Artificial Sequence: Synthetic polypeptide"
EVQLVESGGGLVQPGNSLRLSCAASGFTFSKFGMSWVRQAPGKGLEWVSSISGSGRDTLYAESVKGRFTISRDNAKTTLYLQMNSLRPEDTAVYYCTIGGSLSVSSQGTLVTVSSSGGPGPAGLYAQPGSCDLPQTHSLGSRRTLMLLAQMRRISLFSCLKDRHDFGFPQEEFGNQFQKAETIPVLHEMIQQIFNLFSTKDSSAAWDETLLDKFYTELYQQLNDLEACVIQGVGVTETPLMKEDSILAVRKYFQRITLYLKEKKYSPCAWEVVRAEIMRSFSLSTNLQESLRSKESGGPGPAGLYAQPGSEVQLVESGGGLVQPGNSLRLSCAASGFTFSKFGMSWVRQAPGKGLEWVSSISGSGRDTLYAESVKGRFTISRDNAKTTLYLQMNSLRPEDTAVYYCTIGGSLSVSSQGTLVTVSS

SEQ ID NO: 428 - protein, 425 aa, Artificial Sequence
  source: /note="Description of Artificial Sequence: Synthetic polypeptide"
EVQLVESGGGLVQPGNSLRLSCAASGFTFSKFGMSWVRQAPGKGLEWVSSISGSGRDTLYAESVKGRFTISRDNAKTTLYLQMNSLRPEDTAVYYCTIGGSLSVSSQGTLVTVSSSGGPALFKSSFPPGSCDLPQTHSLGSRRTLMLLAQMRRISLFSCLKDRHDFGFPQEEFGNQFQKAETIPVLHEMIQQIFNLFSTKDSSAAWDETLLDKFYTELYQQLNDLEACVIQGVGVTETPLMKEDSILAVRKYFQRITLYLKEKKYSPCAWEVVRAEIMRSFSLSTNLQESLRSKESGGPALFKSSFPPGSEVQLVESGGGLVQPGNSLRLSCAASGFTFSKFGMSWVRQAPGKGLEWVSSISGSGRDTLYAESVKGRFTISRDNAKTTLYLQMNSLRPEDTAVYYCTIGGSLSVSSQGTLVTVSS

SEQ ID NO: 429 - protein, 427 aa, Artificial Sequence
  source: /note="Description of Artificial Sequence: Synthetic polypeptide"
EVQLVESGGGLVQPGNSLRLSCAASGFTFSKFGMSWVRQAPGKGLEWVSSISGSGRDTLYAESVKGRFTISRDNAKTTLYLQMNSLRPEDTAVYYCTIGGSLSVSSQGTLVTVSSSGGPPLAQKLKSSPGSCDLPQTHSLGSRRTLMLLAQMRRISLFSCLKDRHDFGFPQEEFGNQFQKAETIPVLHEMIQQIFNLFSTKDSSAAWDETLLDKFYTELYQQLNDLEACVIQGVGVTETPLMKEDSILAVRKYFQRITLYLKEKKYSPCAWEVVRAEIMRSFSLSTNLQESLRSKESGGPPLAQKLKSSPGSEVQLVESGGGLVQPGNSLRLSCAASGFTFSKFGMSWVRQAPGKGLEWVSSISGSGRDTLYAESVKGRFTISRDNAKTTLYLQMNSLRPEDTAVYYCTIGGSLSVSSQGTLVTVSS

SEQ ID NO: 430 - protein, 728 aa, Artificial Sequence
  source: /note="Description of Artificial Sequence: Synthetic polypeptide"
EVQLVESGGGLVQPGNSLRLSCAASGFTFSKFGMSWVRQAPGKGLEWVSSISGSGRDTLYAESVKGRFTISRDNAKTTLYLQMNSLRPEDTAVYYCTIGGSLSVSSQGTLVTVSSSGGPGPAGMKGLPGSHGTVIESLESLNNYFNSSGIDVEEKSLFLDIWRNWQKDGDMKILQSQIISFYLRLFEVLKDNQAISNNISVIESHLITTFFSNSKAKKDAFMSIAKFEVNNPQVQRQAFNELIRVVHQLLPESSLRKRKRSRCSGGPGPAGMKGLPGSCDLPQTHNLRNKRALTLLVQMRRLSPLSCLKDRKDFGFPQEKVDAQQIKKAQAIPVLSELTQQILNIFTSKDSSAAWNTTLLDSFCNDLHQQLNDLQGCLMQQVGVQEFPLTQEDALLAVRKYFHRITVYLREKKHSPCAWEVVRAEVWRALSSSANVLGRLREEKSGGPGPAGMKGLPGSHGTVIESLESLNNYFNSSGIDVEEKSLFLDIWRNWQKDGDMKILQSQIISFYLRLFEVLKDNQAISNNISVIESHLITTFFSNSKAKKDAFMSIAKFEVNNPQVQRQAFNELIRVVHQLLPESSLRKRKRSRCSGGPGPAGMKGLPGSEVQLVESGGGLVQPGNSLRLSCAASGFTFSKFGMSWVRQAPGKGLEWVSSISGSGRDTLYAESVKGRFTISRDNAKTTLYLQMNSLRPEDTAVYYCTIGGSLSVSSQGTLVTVSSHHHHHH

SEQ ID NO: 431 - protein, 947 aa, Artificial Sequence
  source: /note="Description of Artificial Sequence: Synthetic polypeptide"
LVEEPKNLVKTNCDLYEKLGEYGFQNAILVRYTQKAPQVSTPTLVEAARNLGRVGTKCCTLPEDQRLPCVEDYLSAILNRVCLLHEKTPVSEHVTKCCSGSLVERRPCFSALTVDETYVPKEFKAETFTFHSDICTLPEKEKQIKKQTALAELVKHKPKATAEQLKTVMDDFAQFLDTCCKAADKDTCFSTEGPNLVTRCKDALASGGPGPAGMKGLPGSHGTVIESLESLNNYFNSSGIDVEEKSLFLDIWRNWQKDGDMKILQSQIISFYLRLFEVLKDNQAISNNISVIESHLITTFFSNSKAKKDAFMSIAKFEVNNPQVQRQAFNELIRVVHQLLPESSLRKRKRSRCSGGPGPAGMKGLPGSLVEEPKNLVKTNCDLYEKLGEYGFQNAILVRYTQKAPQVSTPTLVEAARNLGRVGTKCCTLPEDQRLPCVEDYLSAILNRVCLLHEKTPVSEHVTKCCSGSLVERRPCFSALTVDETYVPKEFKAETFTFHSDICTLPEKEKQIKKQTALAELVKHKPKATAEQLKTVMDDFAQFLDTCCKAADKDTCFSTEGPNLVTRCKDALASGGPGPAGMKGLPGSHGTVIESLESLNNYFNSSGIDVEEKSLFLDIWRNWQKDGDMKILQSQIISFYLRLFEVLKDNQAISNNISVIESHLITTFFSNSKAKKDAFMSIAKFEVNNPQVQRQAFNELIRVVHQLLPESSLRKRKRSRCSGGPGPAGMKGLPGSLVEEPKNLVKTNCDLYEKLGEYGFQNAILVRYTQKAPQVSTPTLVEAARNLGRVGTKCCTLPEDQRLPCVEDYLSAILNRVCLLHEKTPVSEHVTKCCSGSLVERRPCFSALTVDETYVPKEFKAETFTFHSDICTLPEKEKQIKKQTALAELVKHKPKATAEQLKTVMDDFAQFLDTCCKAADKDTCFSTEGPNLVTRCKDALAHHHHHH

SEQ ID NO: 432 - protein, 1574 aa, Artificial Sequence
  source: /note="Description of Artificial Sequence: Synthetic polypeptide"
EAHKSEIAHRYNDLGEQHFKGLVLIAFSQYLQKCSYDEHAKLVQEVTDFAKTCVADESAANCDKSLHTLFGDKLCAIPNLRENYGELADCCTKQEPERNECFLQHKDDNPSLPPFERPEAEAMCTSFKENPTTFMGHYLHEVARRHPYFYAPELLYYAEQYNEILTQCCAEADKESCLTPKLDGVKEKALVSSVRQGGGGSGGGGSGGSLVEEPKNLVKTNCDLYEKLGEYGFQNAILVRYTQKAPQVSTPTLVEAARNLGRVGTKCCTLPEDQRLPCVEDYLSAILNRVCLLHEKTPVSEHVTKCCSGSLVERRPCFSALTVDETYVPKEFKAETFTFHSDICTLPEKEKQIKKQTALAELVKHKPKATAEQLKTVMDDFAQFLDTCCKAADKDTCFSTEGPNLVTRCKDALASGGPGPAGMKGLPGSHGTVIESLESLNNYFNSSGIDVEEKSLFLDIWRNWQKDGDMKILQSQIISFYLRLFEVLKDNQAISNNISVIESHLITTFFSNSKAKKDAFMSIAKFEVNNPQVQRQAFNELIRVVHQLLPESSLRKRKRSRCSGGPGPAGMKGLPGSEAHKSEIAHRYNDLGEQHFKGLVLIAFSQYLQKCSYDEHAKLVQEVTDFAKTCVADESAANCDKSLHTLFGDKLCAIPNLRENYGELADCCTKQEPERNECFLQHKDDNPSLPPFERPEAEAMCTSFKENPTTFMGHYLHEVARRHPYFYAPELLYYAEQYNEILTQCCAEADKESCLTPKLDGVKEKALVSSVRQGGGGSGGGGSGGSLVEEPKNLVKTNCDLYEKLGEYGFQNAILVRYTQKAPQVSTPTLVEAARNLGRVGTKCCTLPEDQRLPCVEDYLSAILNRVCLLHEKTPVSEHVTKCCSGSLVERRPCFSALTVDETYVPKEFKAETFTFHSDICTLPEKEKQIKKQTALAELVKHKPKATAEQLKTVMDDFAQFLDTCCKAADKDTCFSTEGPNLVTRCKDALASGGPGPAGMKGLPGSHGTVIESLESLNNYFNSSGIDVEEKSLFLDIWRNWQKDGDMKILQSQIISFYLRLFEVLKDNQAISNNISVIESHLITTFFSNSKAKKDAFMSIAKFEVNNPQVQRQAFNELIRVVHQLLPESSLRKRKRSRCSGGPGPAGMKGLPGSEAHKSEIAHRYNDLGEQHFKGLVLIAFSQYLQKCSYDEHAKLVQEVTDFAKTCVADESAANCDKSLHTLFGDKLCAIPNLRENYGELADCCTKQEPERNECFLQHKDDNPSLPPFERPEAEAMCTSFKENPTTFMGHYLHEVARRHPYFYAPELLYYAEQYNEILTQCCAEADKESCLTPKLDGVKEKALVSSVRQGGGGSGGGGSGGSLVEEPKNLVKTNCDLYEKLGEYGFQNAILVRYTQKAPQVSTPTLVEAARNLGRVGTKCCTLPEDQRLPCVEDYLSAILNRVCLLHEKTPVSEHVTKCCSGSLVERRPCFSALTVDETYVPKEFKAETFTFHSDICTLPEKEKQIKKQTALAELVKHKPKATAEQLKTVMDDFAQFLDTCCKAADKDTCFSTEGPNLVTRCKDALAHHHHHH

SEQ ID NO: 433 - protein, 745 aa, Artificial Sequence
  source: /note="Description of Artificial Sequence: Synthetic polypeptide"
EVQLVESGGGLVQPGNSLRLSCAASGFTFSKFGMSWVRQAPGKGLEWVSSISGSGRDTLYAESVKGRFTISRDNAKTTLYLQMNSLRPEDTAVYYCTIGGSLSVSSQGTLVTVSSGGGGSGGGSGGPGPAGMKGLPGSGGGGSGGGSHGTVIESLESLNNYFNSSGIDVEEKSLFLDIWRNWQKDGDMKILQSQIISFYLRLFEVLKDNQAISNNISVIESHLITTFFSNSKAKKDAFMSIAKFEVNNPQVQRQAFNELIRVVHQLLPESSLRKRKRSRCGGGGSGGGSGGPGPAGMKGLPGSGGGGSGGGSEVQLVESGGGLVQPGNSLRLSCAASGFTFSKFGMSWVRQAPGKGLEWVSSISGSGRDTLYAESVKGRFTISRDNAKTTLYLQMNSLRPEDTAVYYCTIGGSLSVSSQGTLVTVSSGGGGSGGGSGGPGPAGMKGLPGSGGGGSGGGSHGTVIESLESLNNYFNSSGIDVEEKSLFLDIWRNWQKDGDMKILQSQIISFYLRLFEVLKDNQAISNNISVIESHLITTFFSNSKAKKDAFMSIAKFEVNNPQVQRQAFNELIRVVHQLLPESSLRKRKRSRCGGGGSGGGSGGPGPAGMKGLPGSGGGGSGGGSEVQLVESGGGLVQPGNSLRLSCAASGFTFSKFGMSWVRQAPGKGLEWVSSISGSGRDTLYAESVKGRFTISRDNAKTTLYLQMNSLRPEDTAVYYCTIGGSLSVSSQGTLVTVSSHHHHHH

SEQ ID NO: 434 - protein, 936 aa, Artificial Sequence
  source: /note="Description of Artificial Sequence: Synthetic polypeptide"
EVQLVESGGGLVQPGNSLRLSCAASGFTFSKFGMSWVRQAPGKGLEWVSSISGSGRDTLYAESVKGRFTISRDNAKTTLYLQMNSLRPEDTAVYYCTIGGSLSVSSQGTLVTVSSGGGGSGGGGSGGGGSIWELKKDVYVVELDWYPDAPGEMVVLTCDTPEEDGITWTLDQSSEVLGSGKTLTIQVKEFGDAGQYTCHKGGEVLSHSLLLLHKKEDGIWSTDILKDQKEPKNKTFLRCEAKNYSGRFTCWWLTTISTDLTFSVKSSRGSSDPQGVTCGAATLSAERVRGDNKEYEYSVECQEDSACPAAEESLPIEVMVDAVHKLKYENYTSSFFIRDIIKPDPPKNLQLKPLKNSRQVEVSWEYPDTWSTPHSYFSLTFCVQVQGKSKREKKDRVFTDKTSATVICRKNASISVRAQDRYYSSSWSEWASVPCSGGGGSGGGGSGGGGSRVIPVSGPARCLSQSRNLLKTTDDMVKTAREKLKHYSCTAEDIDHEDITRDQTSTLKTCLPLELHKNESCLATRETSSTTRGSCLPPQKTSLMMTLCLGSIYEDLKMYQTEFQAINAALQNHNHQQIILDKGMLVAIDELMQSLNHNGETLRQKPPVGEADPYRVKMKLCILLHAFSTRVVTINRVMGYLSSAGGGGSGGGGSGGGGSGGGGSGGGGSGGGGSGGGGSGGGGSGGGGSQSVLTQPPSVSGAPGQRVTISCSGSRSNIGSNTVKWYQQLPGTAPKLLIYYNDQRPSGVPDRFSGSKSGTSASLAITGLQAEDEADYYCQSYDRYTHPALLFGTGTKVTVLGGGGSGGGGSGGGGSQVQLVESGGGVVQPGRSLRLSCAASGFTFSSYGMHWVRQAPGKGLEWVAFIRYDGSNKYYADSVKGRFTISRDNSKNTLYLQMNSLRAEDTAVYYCKTHGSHDNWGQGTMVTVSSHHHHHH

SEQ ID NO: 435 - protein, 1405 aa, Artificial Sequence
  source: /note="Description of Artificial Sequence: Synthetic polypeptide"
EAHKSEIAHRYNDLGEQHFKGLVLIAFSQYLQKCSYDEHAKLVQEVTDFAKTCVADESAANCDKSLHTLFGDKLCAIPNLRENYGELADCCTKQEPERNECFLQHKDDNPSLPPFERPEAEAMCTSFKENPTTFMGHYLHEVARRHPYFYAPELLYYAEQYNEILTQCCAEADKESCLTPKLDGVKEKALVSSVRQRMKCSSMQKFGERAFKAWAVARLSQTFPNADFAEITKLATDLTKVNKECCHGDLLECADDRAELAKYMCENQATISSKLQTCCDKPLLKKAHCLSEVEHDTMPADLPAIAADFVEDQEVCKNYAEAKDVFLGTFLYEYSRRHPDYSVSLLLRLAKKYEATLEKCCAEANPPACYGTVLAEFQPLVEEPKNLVKTNCDLYEKLGEYGFQNAILVRYTQKAPQVSTPTLVEAARNLGRVGTKCCTLPEDQRLPCVEDYLSAILNRVCLLHEKTPVSEHVTKCCSGSLVERRPCFSALTVDETYVPKEFKAETFTFHSDICTLPEKEKQIKKQTALAELVKHKPKATAEQLKTVMDDFAQFLDTCCKAADKDTCFSTEGPNLVTRCKDALASGGPGPAGMKGLPGSIWELKKDVYVVELDWYPDAPGEMVVLTCDTPEEDGITWTLDQSSEVLGSGKTLTIQVKEFGDAGQYTCHKGGEVLSHSLLLLHKKEDGIWSTDILKDQKEPKNKTFLRCEAKNYSGRFTCWWLTTISTDLTFSVKSSRGSSDPQGVTCGAATLSAERVRGDNKEYEYSVECQEDSACPAAEESLPIEVMVDAVHKLKYENYTSSFFIRDIIKPDPPKNLQLKPLKNSRQVEVSWEYPDTWSTPHSYFSLTFCVQVQGKSKREKKDRVFTDKTSATVICRKNASISVRAQDRYYSSSWSEWASVPCSGGGGSGGGGSGGGGSRVIPVSGPARCLSQSRNLLKTTDDMVKTAREKLKHYSCTAEDIDHEDITRDQTSTLKTCLPLELHKNESCLATRETSSTTRGSCLPPQKTSLMMTLCLGSIYEDLKMYQTEFQAINAALQNHNHQQIILDKGMLVAIDELMQSLNHNGETLRQKPPVGEADPYRVKMKLCILLHAFSTRVVTINRVMGYLSSASGGPGPAGMKGLPGSGGGGSGGGGSGGGGSGGGGSGGGGSGGGGSQSVLTQPPSVSGAPGQRVTISCSGSRSNIGSNTVKWYQQLPGTAPKLLIYYNDQRPSGVPDRFSGSKSGTSASLAITGLQAEDEADYYCQSYDRYTHPALLFGTGTKVTVLGGGGSGGGGSGGGGSQVQLVESGGGVVQPGRSLRLSCAASGFTFSSYGMHWVRQAPGKGLEWVAFIRYDGSNKYYADSVKGRFTISRDNSKNTLYLQMNSLRAEDTAVYYCKTHGSHDNWGQGTMVTVSSHHHHHH

SEQ ID NO: 436 - protein, 1405 aa, Artificial Sequence
  source: /note="Description of Artificial Sequence: Synthetic polypeptide"
IWELKKDVYVVELDWYPDAPGEMVVLTCDTPEEDGITWTLDQSSEVLGSGKTLTIQVKEFGDAGQYTCHKGGEVLSHSLLLLHKKEDGIWSTDILKDQKEPKNKTFLRCEAKNYSGRFTCWWLTTISTDLTFSVKSSRGSSDPQGVTCGAATLSAERVRGDNKEYEYSVECQEDSACPAAEESLPIEVMVDAVHKLKYENYTSSFFIRDIIKPDPPKNLQLKPLKNSRQVEVSWEYPDTWSTPHSYFSLTFCVQVQGKSKREKKDRVFTDKTSATVICRKNASISVRAQDRYYSSSWSEWASVPCSGGGGSGGGGSGGGGSRVIPVSGPARCLSQSRNLLKTTDDMVKTAREKLKHYSCTAEDIDHEDITRDQTSTLKTCLPLELHKNESCLATRETSSTTRGSCLPPQKTSLMMTLCLGSIYEDLKMYQTEFQAINAALQNHNHQQIILDKGMLVAIDELMQSLNHNGETLRQKPPVGEADPYRVKMKLCILLHAFSTRVVTINRVMGYLSSASGGPGPAGMKGLPGSGGGGSGGGGSGGGGSGGGGSGGGGSGGGGSQSVLTQPPSVSGAPGQRVTISCSGSRSNIGSNTVKWYQQLPGTAPKLLIYYNDQRPSGVPDRFSGSKSGTSASLAITGLQAEDEADYYCQSYDRYTHPALLFGTGTKVTVLGGGGSGGGGSGGGGSQVQLVESGGGVVQPGRSLRLSCAASGFTFSSYGMHWVRQAPGKGLEWVAFIRYDGSNKYYADSVKGRFTISRDNSKNTLYLQMNSLRAEDTAVYYCKTHGSHDNWGQGTMVTVSSSGGPGPAGMKGLPGSEAHKSEIAHRYNDLGEQHFKGLVLIAFSQYLQKCSYDEHAKLVQEVTDFAKTCVADESAANCDKSLHTLFGDKLCAIPNLRENYGELADCCTKQEPERNECFLQHKDDNPSLPPFERPEAEAMCTSFKENPTTFMGHYLHEVARRHPYFYAPELLYYAEQYNEILTQCCAEADKESCLTPKLDGVKEKALVSSVRQRMKCSSMQKFGERAFKAWAVARLSQTFPNADFAEITKLATDLTKVNKECCHGDLLECADDRAELAKYMCENQATISSKLQTCCDKPLLKKAHCLSEVEHDTMPADLPAIAADFVEDQEVCKNYAEAKDVFLGTFLYEYSRRHPDYSVSLLLRLAKKYEATLEKCCAEANPPACYGTVLAEFQPLVEEPKNLVKTNCDLYEKLGEYGFQNAILVRYTQKAPQVSTPTLVEAARNLGRVGTKCCTLPEDQRLPCVEDYLSAILNRVCLLHEKTPVSEHVTKCCSGSLVERRPCFSALTVDETYVPKEFKAETFTFHSDICTLPEKEKQIKKQTALAELVKHKPKATAEQLKTVMDDFAQFLDTCCKAADKDTCFSTEGPNLVTRCKDALAHHHHHH

SEQ ID NO: 437 - protein, 1048 aa, Artificial Sequence
  source: /note="Description of Artificial Sequence: Synthetic polypeptide"
VPRDCGCKPCICTVPEVSSVFIFPPKPKDVLTITLTPKVTCVVVDISKDDPEVQFSWFVDDVEVHTAQTQPREEQFNSTFRSVSELPIMHQDWLNGKEFKCRVNSAAFPAPIEKTISKTKGRPKAPQVYTIPPPKEQMAKDKVSLTCMITDFFPEDITVEWQWNGQPAENYKNTQPIMDTDGSYFVYSKLNVQKSNWEAGNTFTCSVLHEGLHNHHTEKSLSHSPGKSGGPGPAGMKGLPGSIWELKKDVYVVELDWYPDAPGEMVVLTCDTPEEDGITWTLDQSSEVLGSGKTLTIQVKEFGDAGQYTCHKGGEVLSHSLLLLHKKEDGIWSTDILKDQKEPKNKTFLRCEAKNYSGRFTCWWLTTISTDLTFSVKSSRGSSDPQGVTCGAATLSAERVRGDNKEYEYSVECQEDSACPAAEESLPIEVMVDAVHKLKYENYTSSFFIRDIIKPDPPKNLQLKPLKNSRQVEVSWEYPDTWSTPHSYFSLTFCVQVQGKSKREKKDRVFTDKTSATVICRKNASISVRAQDRYYSSSWSEWASVPCSGGGGSGGGGSGGGGSRVIPVSGPARCLSQSRNLLKTTDDMVKTAREKLKHYSCTAEDIDHEDITRDQTSTLKTCLPLELHKNESCLATRETSSTTRGSCLPPQKTSLMMTLCLGSIYEDLKMYQTEFQAINAALQNHNHQQIILDKGMLVAIDELMQSLNHNGETLRQKPPVGEADPYRVKMKLCILLHAFSTRVVTINRVMGYLSSASGGPGPAGMKGLPGSGGGGSGGGGSGGGGSGGGGSGGGGSGGGGSQSVLTQPPSVSGAPGQRVTISCSGSRSNIGSNTVKWYQQLPGTAPKLLIYYNDQRPSGVPDRFSGSKSGTSASLAITGLQAEDEADYYCQSYDRYTHPALLFGTGTKVTVLGGGGSGGGGSGGGGSQVQLVESGGGVVQPGRSLRLSCAASGFTFSSYGMHWVRQAPGKGLEWVAFIRYDGSNKYYADSVKGRFTISRDNSKNTLYLQMNSLRAEDTAVYYCKTHGSHDNWGQGTMVTVSSHHHHHH

SEQ ID NO: 438 - protein, 1048 aa, Artificial Sequence
  source: /note="Description of Artificial Sequence: Synthetic polypeptide"
IWELKKDVYVVELDWYPDAPGEMVVLTCDTPEEDGITWTLDQSSEVLGSGKTLTIQVKEFGDAGQYTCHKGGEVLSHSLLLLHKKEDGIWSTDILKDQKEPKNKTFLRCEAKNYSGRFTCWWLTTISTDLTFSVKSSRGSSDPQGVTCGAATLSAERVRGDNKEYEYSVECQEDSACPAAEESLPIEVMVDAVHKLKYENYTSSFFIRDIIKPDPPKNLQLKPLKNSRQVEVSWEYPDTWSTPHSYFSLTFCVQVQGKSKREKKDRVFTDKTSATVICRKNASISVRAQDRYYSSSWSEWASVPCSGGGGSGGGGSGGGGSRVIPVSGPARCLSQSRNLLKTTDDMVKTAREKLKHYSCTAEDIDHEDITRDQTSTLKTCLPLELHKNESCLATRETSSTTRGSCLPPQKTSLMMTLCLGSIYEDLKMYQTEFQAINAALQNHNHQQIILDKGMLVAIDELMQSLNHNGETLRQKPPVGEADPYRVKMKLCILLHAFSTRVVTINRVMGYLSSASGGPGPAGMKGLPGSGGGGSGGGGSGGGGSGGGGSGGGGSGGGGSQSVLTQPPSVSGAPGQRVTISCSGSRSNIGSNTVKWYQQLPGTAPKLLIYYNDQRPSGVPDRFSGSKSGTSASLAITGLQAEDEADYYCQSYDRYTHPALLFGTGTKVTVLGGGGSGGGGSGGGGSQVQLVESGGGVVQPGRSLRLSCAASGFTFSSYGMHWVRQAPGKGLEWVAFIRYDGSNKYYADSVKGRFTISRDNSKNTLYLQMNSLRAEDTAVYYCKTHGSHDNWGQGTMVTVSSSGGPGPAGMKGLPGSVPRDCGCKPCICTVPEVSSVFIFPPKPKDVLTITLTPKVTCVVVDISKDDPEVQFSWFVDDVEVHTAQTQPREEQFNSTFRSVSELPIMHQDWLNGKEFKCRVNSAAFPAPIEKTISKTKGRPKAPQVYTIPPPKEQMAKDKVSLTCMITDFFPEDITVEWQWNGQPAENYKNTQPIMDTDGSYFVYSKLNVQKSNWEAGNTFTCSVLHEGLHNHHTEKSLSHSPGKHHHHHH

SEQ ID NO: 439 - protein, 936 aa, Artificial Sequence
  source: /note="Description of Artificial Sequence: Synthetic polypeptide"
EVQLVESGGGLVQPGNSLRLSCAASGFTFSKFGMSWVRQAPGKGLEWVSSISGSGRDTLYAESVKGRFTISRDNAKTTLYLQMNSLRPEDTAVYYCTIGGSLSVSSQGTLVTVSSSGGPGPAGMKGLPGSIWELKKDVYVVELDWYPDAPGEMVVLTCDTPEEDGITWTLDQSSEVLGSGKTLTIQVKEFGDAGQYTCHKGGEVLSHSLLLLHKKEDGIWSTDILKDQKEPKNKTFLRCEAKNYSGRFTCWWLTTISTDLTFSVKSSRGSSDPQGVTCGAATLSAERVRGDNKEYEYSVECQEDSACPAAEESLPIEVMVDAVHKLKYENYTSSFFIRDIIKPDPPKNLQLKPLKNSRQVEVSWEYPDTWSTPHSYFSLTFCVQVQGKSKREKKDRVFTDKTSATVICRKNASISVRAQDRYYSSSWSEWASVPCSGGGGSGGGGSGGGGSRVIPVSGPARCLSQSRNLLKTTDDMVKTAREKLKHYSCTAEDIDHEDITRDQTSTLKTCLPLELHKNESCLATRETSSTTRGSCLPPQKTSLMMTLCLGSIYEDLKMYQTEFQAINAALQNHNHQQIILDKGMLVAIDELMQSLNHNGETLRQKPPVGEADPYRVKMKLCILLHAFSTRVVTINRVMGYLSSASGGPGPAGMKGLPGSGGGGSGGGGSGGGGSGGGGSGGGGSGGGGSQSVLTQPPSVSGAPGQRVTISCSGSRSNIGSNTVKWYQQLPGTAPKLLIYYNDQRPSGVPDRFSGSKSGTSASLAITGLQAEDEADYYCQSYDRYTHPALLFGTGTKVTVLSGGPGPAGMKGLPGSQVQLVESGGGVVQPGRSLRLSCAASGFTFSSYGMHWVRQAPGKGLEWVAFIRYDGSNKYYADSVKGRFTISRDNSKNTLYLQMNSLRAEDTAVYYCKTHGSHDNWGQGTMVTVSSHHHHHH

SEQ ID NO: 440 - protein, 817 aa, Artificial Sequence
  source: /note="Description of Artificial Sequence: Synthetic polypeptide"
EVQLVESGGGLVQPGNSLRLSCAASGFTFSKFGMSWVRQAPGKGLEWVSSISGSGRDTLYAESVKGRFTISRDNAKTTLYLQMNSLRPEDTAVYYCTIGGSLSVSSQGTLVTVSSSGGPGPAGMKGLPGSIWELKKDVYVVELDWYPDAPGEMVVLTCDTPEEDGITWTLDQSSEVLGSGKTLTIQVKEFGDAGQYTCHKGGEVLSHSLLLLHKKEDGIWSTDILKDQKEPKNKTFLRCEAKNYSGRFTCWWLTTISTDLTFSVKSSRGSSDPQGVTCGAATLSAERVRGDNKEYEYSVECQEDSACPAAEESLPIEVMVDAVHKLKYENYTSSFFIRDIIKPDPPKNLQLKPLKNSRQVEVSWEYPDTWSTPHSYFSLTFCVQVQGKSKREKKDRVFTDKTSATVICRKNASISVRAQDRYYSSSWSEWASVPCSGGGGSGGGGSGGGGSRVIPVSGPARCLSQSRNLLKTTDDMVKTAREKLKHYSCTAEDIDHEDITRDQTSTLKTCLPLELHKNESCLATRETSSTTRGSCLPPQKTSLMMTLCLGSIYEDLKMYQTEFQAINAALQNHNHQQIILDKGMLVAIDELMQSLNHNGETLRQKPPVGEADPYRVKMKLCILLHAFSTRVVTINRVMGYLSSASGGPGPAGMKGLPGSGGGGSGGGGSGGGGSGGGGSGGGGSGGGGSQVQLQESGGGLVQAGGSLRLSCAASGRTFSSVYDMGWFRQAPGKDREFVARITESARNTRYADSVRGRFTISRDNAKNTVYLQMNNLELEDAAVYYCAADPQTVVVGTPDYWGQGTQVTVSSHHHHHH

SEQ ID NO: 441 - protein, 547 aa, Artificial Sequence
  source: /note="Description of Artificial Sequence: Synthetic polypeptide"
APTSSSTKKTQLQLEHLLLDLQMILNGINNYKNPKLTRMLTFKFYMPKKATELKHLQCLEEELKPLEEVLNLAQSKNFHLRPRDLISNINVIVLELKGSETTFMCEYADETATIVEFLNRWITFCQSIISTLTSGGPALFKSSFPPGSEVQLVESGGGLVQPGNSLRLSCAASGFTFSKFGMSWVRQAPGKGLEWVSSISGSGRDTLYAESVKGRFTISRDNAKTTLYLQMNSLRPEDTAVYYCTIGGSLSVSSQGTLVTVSSGGGGSGGGGSGGGGSGGGGSGGGGSGGGGSSGGPALFKSSFPPGSEVQLVESGGGLVQPGGSLRLSCAASGFTFSSYTLAWVRQAPGKGLEWVAAIDSSSYTYSPDTVRGRFTISRDNAKNSLYLQMNSLRAEDTAVYYCARDSNWDALDYWGCGTTVTVSSGGGGSGGGGSGGGGSDIQMTQSPSSLSASVGDRVTITCKVTEKVWGNVAWYQQKPGKCPISLIYSPSLRKSGVPSRFSGSGSGTDFTLTISSLQPEDFATYYCQQYYTYPYTFGGGTKVEIK

SEQ ID NO: 442 - protein, 5 aa, Unknown
  source: /note="Description of Unknown: Sortase A cleavage site"
  MOD_RES (3)..(3): Any amino acid
LPXTG

SEQ ID NO: 443 - protein, 25 aa, Artificial Sequence
  source: /note="Description of Artificial Sequence: Synthetic peptide"
  SITE (1)..(25): /note="This sequence may encompass 1-5 'Gly Gly Gly Gly Ser' repeating units"
GGGGSGGGGSGGGGSGGGGSGGGGS

SEQ ID NO: 444 - protein, 20 aa, Artificial Sequence
  source: /note="Description of Artificial Sequence: Synthetic peptide"
  SITE (1)..(20): /note="This sequence may encompass 1-5 'Gly Gly Gly Ser' repeating units"
GGGSGGGSGGGSGGGSGGGS

SEQ ID NO: 445 - protein, 7 aa, Unknown
  source: /note="Description of Unknown: protease-cleavable sequence"
GPLGVRG

SEQ ID NO: 446 - protein, 8 aa, Unknown
  source: /note="Description of Unknown: protease-cleavable sequence"
IPVSLRSG

SEQ ID NO: 447 - protein, 8 aa, Unknown
  source: /note="Description of Unknown: protease-cleavable sequence"
VPLSLYSG

SEQ ID NO: 448 - protein, 10 aa, Unknown
  source: /note="Description of Unknown: protease-cleavable sequence"
SGESPAYYTA

SEQ ID NO: 449 - protein, 5 aa, Artificial Sequence
  source: /note="Description of Artificial Sequence: Synthetic peptide"
GGGGS

SEQ ID NO: 450 - protein, 6 aa, Artificial Sequence
  source: /note="Description of Artificial Sequence: Synthetic peptide"
GSGSGS

SEQ ID NO: 451 - protein, 13 aa, Artificial Sequence
  source: /note="Description of Artificial Sequence: Synthetic peptide"
GSGGGSGGGSGGT

SEQ ID NO: 452 - protein, 15 aa, Artificial Sequence
  source: /note="Description of Artificial Sequence: Synthetic peptide"
GGGGSGGGGSGGGGS

SEQ ID NO: 453 - protein, 20 aa, Artificial Sequence
  source: /note="Description of Artificial Sequence: Synthetic peptide"
GGGGSGGGGSGGGGSGGGGS

SEQ ID NO: 454 - protein, 934 aa, Artificial Sequence
  source: /note="Description of Artificial Sequence: Synthetic polypeptide"
EVQLVESGGGLVQPGNSLRLSCAASGFTFSKFGMSWVRQAPGKGLEWVSSISGSGRDTLYAESVKGRFTISRDNAKTTLYLQMNSLRPEDTAVYYCTIGGSLSVSSQGTLVTVSSSGGPGPAGLYAQPGSIWELKKDVYVVELDWYPDAPGEMVVLTCDTPEEDGITWTLDQSSEVLGSGKTLTIQVKEFGDAGQYTCHKGGEVLSHSLLLLHKKEDGIWSTDILKDQKEPKNKTFLRCEAKNYSGRFTCWWLTTISTDLTFSVKSSRGSSDPQGVTCGAATLSAERVRGDNKEYEYSVECQEDSACPAAEESLPIEVMVDAVHKLKYENYTSSFFIRDIIKPDPPKNLQLKPLKNSRQVEVSWEYPDTWSTPHSYFSLTFCVQVQGKSKREKKDRVFTDKTSATVICRKNASISVRAQDRYYSSSWSEWASVPCSGGGGSGGGGSGGGGSRNLPVATPDPGMFPCLHHSQNLLRAVSNMLQKARQTLEFYPCTSEEIDHEDITKDKTSTVEACLPLELTKNESCLNSRETSFITNGSCLASRKTSFMMALCLSSIYEDLKMYQVEFKTMNAKLLMDPKRQIFLDQNMLAVIDELMQALNFNSETVPQKSSLEEPDFYKTKIKLCILLHAFRIRAVTIDRVMSYLNASSGGPGPAGLYAQPGSGGGGSGGGGSGGGGSGGGGSGGGGSGGGGSQSVLTQPPSVSGAPGQRVTISCSGSRSNIGSNTVKWYQQLPGTAPKLLIYYNDQRPSGVPDRFSGSKSGTSASLAITGLQAEDEADYYCQSYDRYTHPALLFGTGTKVTVLGGGGSGGGGSGGGGSQVQLVESGGGVVQPGRSLRLSCAASGFTFSSYGMHWVRQAPGKGLEWVAFIRYDGSNKYYADSVKGRFTISRDNSKNTLYLQMNSLRAEDTAVYYCKTHGSHDNWGQGTMVTVSS

SEQ ID NO: 455 - protein, 930 aa, Artificial Sequence
  source: /note="Description of Artificial Sequence: Synthetic polypeptide"
EVQLVESGGGLVQPGNSLRLSCAASGFTFSKFGMSWVRQAPGKGLEWVSSISGSGRDTLYAESVKGRFTISRDNAKTTLYLQMNSLRPEDTAVYYCTIGGSLSVSSQGTLVTVSSSGGPALFKSSFPPGSIWELKKDVYVVELDWYPDAPGEMVVLTCDTPEEDGITWTLDQSSEVLGSGKTLTIQVKEFGDAGQYTCHKGGEVLSHSLLLLHKKEDGIWSTDILKDQKEPKNKTFLRCEAKNYSGRFTCWWLTTISTDLTFSVKSSRGSSDPQGVTCGAATLSAERVRGDNKEYEYSVECQEDSACPAAEESLPIEVMVDAVHKLKYENYTSSFFIRDIIKPDPPKNLQLKPLKNSRQVEVSWEYPDTWSTPHSYFSLTFCVQVQGKSKREKKDRVFTDKTSATVICRKNASISVRAQDRYYSSSWSEWASVPCSGGGGSGGGGSGGGGSRVIPVSGPARCLSQSRNLLKTTDDMVKTAREKLKHYSCTAEDIDHEDITRDQTSTLKTCLPLELHKNESCLATRETSSTTRGSCLPPQKTSLMMTLCLGSIYEDLKMYQTEFQAINAALQNHNHQQIILDKGMLVAIDELMQSLNHNGETLRQKPPVGEADPYRVKMKLCILLHAFSTRVVTINRVMGYLSSASGGPALFKSSFPPGSGGGGSGGGGSGGGGSGGGGSGGGGSGGGGSQSVLTQPPSVSGAPGQRVTISCSGSRSNIGSNTVKWYQQLPGTAPKLLIYYNDQRPSGVPDRFSGSKSGTSASLAITGLQAEDEADYYCQSYDRYTHPALLFGTGTKVTVLGGGGSGGGGSGGGGSQVQLVESGGGVVQPGRSLRLSCAASGFTFSSYGMHWVRQAPGKGLEWVAFIRYDGSNKYYADSVKGRFTISRDNSKNTLYLQMNSLRAEDTAVYYCKTHGSHDNWGQGTMVTVSS

SEQ ID NO: 456 - protein, 934 aa, Artificial Sequence
  source: /note="Description of Artificial Sequence: Synthetic polypeptide"
EVQLVESGGGLVQPGNSLRLSCAASGFTFSKFGMSWVRQAPGKGLEWVSSISGSGRDTLYAESVKGRFTISRDNAKTTLYLQMNSLRPEDTAVYYCTIGGSLSVSSQGTLVTVSSSGGPALFKSSFPPGSIWELKKDVYVVELDWYPDAPGEMVVLTCDTPEEDGITWTLDQSSEVLGSGKTLTIQVKEFGDAGQYTCHKGGEVLSHSLLLLHKKEDGIWSTDILKDQKEPKNKTFLRCEAKNYSGRFTCWWLTTISTDLTFSVKSSRGSSDPQGVTCGAATLSAERVRGDNKEYEYSVECQEDSACPAAEESLPIEVMVDAVHKLKYENYTSSFFIRDIIKPDPPKNLQLKPLKNSRQVEVSWEYPDTWSTPHSYFSLTFCVQVQGKSKREKKDRVFTDKTSATVICRKNASISVRAQDRYYSSSWSEWASVPCSGGGGSGGGGSGGGGSRNLPVATPDPGMFPCLHHSQNLLRAVSNMLQKARQTLEFYPCTSEEIDHEDITKDKTSTVEACLPLELTKNESCLNSRETSFITNGSCLASRKTSFMMALCLSSIYEDLKMYQVEFKTMNAKLLMDPKRQIFLDQNMLAVIDELMQALNFNSETVPQKSSLEEPDFYKTKIKLCILLHAFRIRAVTIDRVMSYLNASSGGPALFKSSFPPGSGGGGSGGGGSGGGGSGGGGSGGGGSGGGGSQSVLTQPPSVSGAPGQRVTISCSGSRSNIGSNTVKWYQQLPGTAPKLLIYYNDQRPSGVPDRFSGSKSGTSASLAITGLQAEDEADYYCQSYDRYTHPALLFGTGTKVTVLGGGGSGGGGSGGGGSQVQLVESGGGVVQPGRSLRLSCAASGFTFSSYGMHWVRQAPGKGLEWVAFIRYDGSNKYYADSVKGRFTISRDNSKNTLYLQMNSLRAEDTAVYYCKTHGSHDNWGQGTMVTVSS

SEQ ID NO: 457 - protein, 930 aa, Artificial Sequence
  source: /note="Description of Artificial Sequence: Synthetic polypeptide"
EVQLVESGGGLVQPGNSLRLSCAASGFTFSKFGMSWVRQAPGKGLEWVSSISGSGRDTLYAESVKGRFTISRDNAKTTLYLQMNSLRPEDTAVYYCTIGGSLSVSSQGTLVTVSSSGGPGPAGLYAQPGSIWELKKDVYVVELDWYPDAPGEMVVLTCDTPEEDGITWTLDQSSEVLGSGKTLTIQVKEFGDAGQYTCHKGGEVLSHSLLLLHKKEDGIWSTDILKDQKEPKNKTFLRCEAKNYSGRFTCWWLTTISTDLTFSVKSSRGSSDPQGVTCGAATLSAERVRGDNKEYEYSVECQEDSACPAAEESLPIEVMVDAVHKLKYENYTSSFFIRDIIKPDPPKNLQLKPLKNSRQVEVSWEYPDTWSTPHSYFSLTFCVQVQGKSKREKKDRVFTDKTSATVICRKNASISVRAQDRYYSSSWSEWASVPCSGGGGSGGGGSGGGGSRVIPVSGPARCLSQSRNLLKTTDDMVKTAREKLKHYSCTAEDIDHEDITRDQTSTLKTCLPLELHKNESCLATRETSSTTRGSCLPPQKTSLMMTLCLGSIYEDLKMYQTEFQAINAALQNHNHQQIILDKGMLVAIDELMQSLNHNGETLRQKPPVGEADPYRVKMKLCILLHAFSTRVVTINRVMGYLSSASGGPGPAGLYAQPGSGGGGSGGGGSGGGGSGGGGSGGGGSGGGGSQSVLTQPPSVSGAPGQRVTISCSGSRSNIGSNTVKWYQQLPGTAPKLLIYYNDQRPSGVPDRFSGSKSGTSASLAITGLQAEDEADYYCQSYDRYTHPALLFGTGTKVTVLGGGGSGGGGSGGGGSQVQLVESGGGVVQPGRSLRLSCAASGFTFSSYGMHWVRQAPGKGLEWVAFIRYEGSNKYYAESVKGRFTISRDNSKNTLYLQMNSLRAEDTAVYYCKTHGSHDNWGQGTMVTVSS

SEQ ID NO: 458 - protein, 934 aa, Artificial Sequence
  source: /note="Description of Artificial Sequence: Synthetic polypeptide"
EVQLVESGGGLVQPGNSLRLSCAASGFTFSKFGMSWVRQAPGKGLEWVSSISGSGRDTLYAESVKGRFTISRDNAKTTLYLQMNSLRPEDTAVYYCTIGGSLSVSSQGTLVTVSSSGGPGPAGLYAQPGSIWELKKDVYVVELDWYPDAPGEMVVLTCDTPEEDGITWTLDQSSEVLGSGKTLTIQVKEFGDAGQYTCHKGGEVLSHSLLLLHKKEDGIWSTDILKDQKEPKNKTFLRCEAKNYSGRFTCWWLTTISTDLTFSVKSSRGSSDPQGVTCGAATLSAERVRGDNKEYEYSVECQEDSACPAAEESLPIEVMVDAVHKLKYENYTSSFFIRDIIKPDPPKNLQLKPLKNSRQVEVSWEYPDTWSTPHSYFSLTFCVQVQGKSKREKKDRVFTDKTSATVICRKNASISVRAQDRYYSSSWSEWASVPCSGGGGSGGGGSGGGGSRNLPVATPDPGMFPCLHHSQNLLRAVSNMLQKARQTLEFYPCTSEEIDHEDITKDKTSTVEACLPLELTKNESCLNSRETSFITNGSCLASRKTSFMMALCLSSIYEDLKMYQVEFKTMNAKLLMDPKRQIFLDQNMLAVIDELMQALNFNSETVPQKSSLEEPDFYKTKIKLCILLHAFRIRAVTIDRVMSYLNASSGGPGPAGLYAQPGSGGGGSGGGGSGGGGSGGGGSGGGGSGGGGSQSVLTQPPSVSGAPGQRVTISCSGSRSNIGSNTVKWYQQLPGTAPKLLIYYNDQRPSGVPDRFSGSKSGTSASLAITGLQAEDEADYYCQSYDRYTHPALLFGTGTKVTVLGGGGSGGGGSGGGGSQVQLVESGGGVVQPGRSLRLSCAASGFTFSSYGMHWVRQAPGKGLEWVAFIRYEGSNKYYAESVKGRFTISRDNSKNTLYLQMNSLRAEDTAVYYCKTHGSHDNWGQGTMVTVSS

SEQ ID NO: 459 - protein, 930 aa, Artificial Sequence
  source: /note="Description of Artificial Sequence: Synthetic polypeptide"
EVQLVESGGGLVQPGNSLRLSCAASGFTFSKFGMSWVRQAPGKGLEWVSSISGSGRDTLYAESVKGRFTISRDNAKTTLYLQMNSLRPEDTAVYYCTIGGSLSVSSQGTLVTVSSSGGPGPAGLYAQPGSIWELKKDVYVVELDWYPDAPGEMVVLTCDTPEEDGITWTLDQSSEVLGSGKTLTIQVKEFGDAGQYTCHKGGEVLSHSLLLLHKKEDGIWSTDILKDQKEPKNKTFLRCEAKNYSGRFTCWWLTTISTDLTFSVKSSRGSSDPQGVTCGAATLSAERVRGDNKEYEYSVECQEDSACPAAEESLPIEVMVDAVHKLKYENYTSSFFIRDIIKPDPPKNLQLKPLKNSRQVEVSWEYPDTWSTPHSYFSLTFCVQVQGKSKREKKDRVFTDKTSATVICRKNASISVRAQDRYYSSSWSEWASVPCSGGGGSGGGGSGGGGSRVIPVSGPARCLSQSRNLLKTTDDMVKTAREKLKHYSCTAEDIDHEDITRDQTSTLKTCLPLELHKNESCLATRETSSTTRGSCLPPQKTSLMMTLCLGSIYEDLKMYQTEFQAINAALQNHNHQQIILDKGMLVAIDELMQSLNHNGETLRQKPPVGEADPYRVKMKLCILLHAFSTRVVTINRVMGYLSSASGGPGPAGLYAQPGSGGGGSGGGGSGGGGSGGGGSGGGGSGGGGSQSVLTQPPSVSGAPGQRVTISCSGSRSNIGSETVKWYQQLPGTAPKLLIYYNDQRPSGVPDRFSGSKSGTSASLAITGLQAEDEADYYCQSYDRYTHPALLFGTGTKVTVLGGGGSGGGGSGGGGSQVQLVESGGGVVQPGRSLRLSCAASGFTFSSYGMHWVRQAPGKGLEWVAFIRYEGSNKYYAESVKGRFTISRDNSKNTLYLQMNSLRAEDTAVYYCKTHGSHDNWGQGTMVTVSS

SEQ ID NO: 460 - protein, 934 aa, Artificial Sequence
  source: /note="Description of Artificial Sequence: Synthetic polypeptide"
EVQLVESGGGLVQPGNSLRLSCAASGFTFSKFGMSWVRQAPGKGLEWVSSISGSGRDTLYAESVKGRFTISRDNAKTTLYLQMNSLRPEDTAVYYCTIGGSLSVSSQGTLVTVSSSGGPGPAGLYAQPGSIWELKKDVYVVELDWYPDAPGEMVVLTCDTPEEDGITWTLDQSSEVLGSGKTLTIQVKEFGDAGQYTCHKGGEVLSHSLLLLHKKEDGIWSTDILKDQKEPKNKTFLRCEAKNYSGRFTCWWLTTISTDLTFSVKSSRGSSDPQGVTCGAATLSAERVRGDNKEYEYSVECQEDSACPAAEESLPIEVMVDAVHKLKYENYTSSFFIRDIIKPDPPKNLQLKPLKNSRQVEVSWEYPDTWSTPHSYFSLTFCVQVQGKSKREKKDRVFTDKTSATVICRKNASISVRAQDRYYSSSWSEWASVPCSGGGGSGGGGSGGGGSRNLPVATPDPGMFPCLHHSQNLLRAVSNMLQKARQTLEFYPCTSEEIDHEDITKDKTSTVEACLPLELTKNESCLNSRETSFITNGSCLASRKTSFMMALCLSSIYEDLKMYQVEFKTMNAKLLMDPKRQIFLDQNMLAVIDELMQALNFNSETVPQKSSLEEPDFYKTKIKLCILLHAFRIRAVTIDRVMSYLNASSGGPGPAGLYAQPGSGGGGSGGGGSGGGGSGGGGSGGGGSGGGGSQSVLTQPPSVSGAPGQRVTISCSGSRSNIGSETVKWYQQLPGTAPKLLIYYNDQRPSGVPDRFSGSKSGTSASLAITGLQAEDEADYYCQSYDRYTHPALLFGTGTKVTVLGGGGSGGGGSGGGGSQVQLVESGGGVVQPGRSLRLSCAASGFTFSSYGMHWVRQAPGKGLEWVAFIRYEGSNKYYAESVKGRFTISRDNSKNTLYLQMNSLRAEDTAVYYCKTHGSHDNWGQGTMVTVSS

SEQ ID NO: 461 - protein, 930 aa, Artificial Sequence
  source: /note="Description of Artificial Sequence: Synthetic polypeptide"
EVQLVESGGGLVQPGNSLRLSCAASGFTFSKFGMSWVRQAPGKGLEWVSSISGSGRDTLYAESVKGRFTISRDNAKTTLYLQMNSLRPEDTAVYYCTIGGSLSVSSQGTLVTVSSSGGPGPAGLYAQPGSIWELKKDVYVVELDWYPDAPGEMVVLTCDTPEEDGITWTLDQSSEVLGSGKTLTIQVKEFGDAGQYTCHKGGEVLSHSLLLLHKKEDGIWSTDILKDQKEPKNKTFLRCEAKNYSGRFTCWWLTTISTDLTFSVKSSRGSSDPQGVTCGAATLSAERVRGDNKEYEYSVECQEDSACPAAEESLPIEVMVDAVHKLKYENYTSSFFIRDIIKPDPPKNLQLKPLKNSRQVEVSWEYPDTWSTPHSYFSLTFCVQVQGKSKREKKDRVFTDKTSATVICRKNASISVRAQDRYYSSSWSEWASVPCSGGGGSGGGGSGGGGSRVIPVSGPARCLSQSRNLLKTTDDMVKTAREKLKHYSCTAEDIDHEDITRDQTSTLKTCLPLELHKNESCLATRETSSTTRGSCLPPQKTSLMMTLCLGSIYEDLKMYQTEFQAINAALQNHNHQQIILDKGMLVAIDELMQSLNHNGETLRQKPPVGEADPYRVKMKLCILLHAFSTRVVTINRVMGYLSSASGGPGPAGLYAQPGSGGGGSGGGGSGGGGSGGGGSGGGGSGGGGSQSVLTQPPSVSGAPGQRVTISCSGSRSNIGDNTVKWYQQLPGTAPKLLIYYNDQRPSGVPDRFSGSKSGTSASLAITGLQAEDEADYYCQSYDRYTHPALLFGTGTKVTVLGGGGSGGGGSGGGGSQVQLVESGGGVVQPGRSLRLSCAASGFTFSSYGMHWVRQAPGKGLEWVAFIRYEGSNKYYAESVKGRFTISRDNSKNTLYLQMNSLRAEDTAVYYCKTHGSHDNWGQGTMVTVSS

SEQ ID NO: 462 - protein, 934 aa, Artificial Sequence
  source: /note="Description of Artificial Sequence: Synthetic polypeptide"
EVQLVESGGGLVQPGNSLRLSCAASGFTFSKFGMSWVRQAPGKGLEWVSSISGSGRDTLYAESVKGRFTISRDNAKTTLYLQMNSLRPEDTAVYYCTIGGSLSVSSQGTLVTVSSSGGPGPAGLYAQPGSIWELKKDVYVVELDWYPDAPGEMVVLTCDTPEEDGITWTLDQSSEVLGSGKTLTIQVKEFGDAGQYTCHKGGEVLSHSLLLLHKKEDGIWSTDILKDQKEPKNKTFLRCEAKNYSGRFTCWWLTTISTDLTFSVKSSRGSSDPQGVTCGAATLSAERVRGDNKEYEYSVECQEDSACPAAEESLPIEVMVDAVHKLKYENYTSSFFIRDIIKPDPPKNLQLKPLKNSRQVEVSWEYPDTWSTPHSYFSLTFCVQVQGKSKREKKDRVFTDKTSATVICRKNASISVRAQDRYYSSSWSEWASVPCSGGGGSGGGGSGGGGSRNLPVATPDPGMFPCLHHSQNLLRAVSNMLQKARQTLEFYPCTSEEIDHEDITKDKTSTVEACLPLELTKNESCLNSRETSFITNGSCLASRKTSFMMALCLSSIYEDLKMYQVEFKTMNAKLLMDPKRQIFLDQNMLAVIDELMQALNFNSETVPQKSSLEEPDFYKTKIKLCILLHAFRIRAVTIDRVMSYLNASSGGPGPAGLYAQPGSGGGGSGGGGSGGGGSGGGGSGGGGSGGGGSQSVLTQPPSVSGAPGQRVTISCSGSRSNIGDNTVKWYQQLPGTAPKLLIYYNDQRPSGVPDRFSGSKSGTSASLAITGLQAEDEADYYCQSYDRYTHPALLFGTGTKVTVLGGGGSGGGGSGGGGSQVQLVESGGGVVQPGRSLRLSCAASGFTFSSYGMHWVRQAPGKGLEWVAFIRYEGSNKYYAESVKGRFTISRDNSKNTLYLQMNSLRAEDTAVYYCKTHGSHDNWGQGTMVTVSS

SEQ ID NO: 463 - protein, 930 aa, Artificial Sequence
  source: /note="Description of Artificial Sequence: Synthetic polypeptide"
EVQLVESGGGLVQPGNSLRLSCAASGFTFSKFGMSWVRQAPGKGLEWVSSISGSGRDTLYAESVKGRFTISRDNAKTTLYLQMNSLRPEDTAVYYCTIGGSLSVSSQGTLVTVSSSGGPGPAGLYAQPGSIWELKKDVYVVELDWYPDAPGEMVVLTCDTPEEDGITWTLDQSSEVLGSGKTLTIQVKEFGDAGQYTCHKGGEVLSHSLLLLHKKEDGIWSTDILKDQKEPKNKTFLRCEAKNYSGRFTCWWLTTISTDLTFSVKSSRGSSDPQGVTCGAATLSAERVRGDNKEYEYSVECQEDSACPAAEESLPIEVMVDAVHKLKYENYTSSFFIRDIIKPDPPKNLQLKPLKNSRQVEVSWEYPDTWSTPHSYFSLTFCVQVQGKSKREKKDRVFTDKTSATVICRKNASISVRAQDRYYSSSWSEWASVPCSGGGGSGGGGSGGGGSRVIPVSGPARCLSQSRNLLKTTDDMVKTAREKLKHYSCTAEDIDHEDITRDQTSTLKTCLPLELHKNESCLATRETSSTTRGSCLPPQKTSLMMTLCLGSIYEDLKMYQTEFQAINAALQNHNHQQIILDKGMLVAIDELMQSLNHNGETLRQKPPVGEADPYRVKMKLCILLHAFSTRVVTINRVMGYLSSASGGPGPAGLYAQPGSGGGGSGGGGSGGGGSGGGGSGGGGSGGGGSQSVLTQPPSVSGAPGQRVTISCSGSRSNIGDETVKWYQQLPGTAPKLLIYYNDQRPSGVPDRFSGSKSGTSASLAITGLQAEDEADYYCQSYDRYTHPALLFGTGTKVTVLGGGGSGGGGSGGGGSQVQLVESGGGVVQPGRSLRLSCAASGFTFSSYGMHWVRQAPGKGLEWVAFIRYDGSNKYYADSVKGRFTISRDNSKNTLYLQMNSLRAEDTAVYYCKTHGSHDNWGQGTMVTVSS

SEQ ID NO: 464 - protein, 934 aa, Artificial Sequence
  source: /note="Description of Artificial Sequence: Synthetic polypeptide"
EVQLVESGGGLVQPGNSLRLSCAASGFTFSKFGMSWVRQAPGKGLEWVSSISGSGRDTLYAESVKGRFTISRDNAKTTLYLQMNSLRPEDTAVYYCTIGGSLSVSSQGTLVTVSSSGGPGPAGLYAQPGSIWELKKDVYVVELDWYPDAPGEMVVLTCDTPEEDGITWTLDQSSEVLGSGKTLTIQVKEFGDAGQYTCHKGGEVLSHSLLLLHKKEDGIWSTDILKDQKEPKNKTFLRCEAKNYSGRFTCWWLTTISTDLTFSVKSSRGSSDPQGVTCGAATLSAERVRGDNKEYEYSVECQEDSACPAAEESLPIEVMVDAVHKLKYENYTSSFFIRDIIKPDPPKNLQLKPLKNSRQVEVSWEYPDTWSTPHSYFSLTFCVQVQGKSKREKKDRVFTDKTSATVICRKNASISVRAQDRYYSSSWSEWASVPCSGGGGSGGGGSGGGGSRNLPVATPDPGMFPCLHHSQNLLRAVSNMLQKARQTLEFYPCTSEEIDHEDITKDKTSTVEACLPLELTKNESCLNSRETSFITNGSCLASRKTSFMMALCLSSIYEDLKMYQVEFKTMNAKLLMDPKRQIFLDQNMLAVIDELMQALNFNSETVPQKSSLEEPDFYKTKIKLCILLHAFRIRAVTIDRVMSYLNASSGGPGPAGLYAQPGSGGGGSGGGGSGGGGSGGGGSGGGGSGGGGSQSVLTQPPSVSGAPGQRVTISCSGSRSNIGDETVKWYQQLPGTAPKLLIYYNDQRPSGVPDRFSGSKSGTSASLAITGLQAEDEADYYCQSYDRYTHPALLFGTGTKVTVLGGGGSGGGGSGGGGSQVQLVESGGGVVQPGRSLRLSCAASGFTFSSYGMHWVRQAPGKGLEWVAFIRYDGSNKYYADSVKGRFTISRDNSKNTLYLQMNSLRAEDTAVYYCKTHGSHDNWGQGTMVTVSS

SEQ ID NO: 465 - protein, 930 aa, Artificial Sequence
  source: /note="Description of Artificial Sequence: Synthetic polypeptide"
EVQLVESGGGLVQPGNSLRLSCAASGFTFSKFGMSWVRQAPGKGLEWVSSISGSGRDTLYAESVKGRFTISRDNAKTTLYLQMNSLRPEDTAVYYCTIGGSLSVSSQGTLVTVSSSGGPGPAGLYAQPGSIWELKKDVYVVELDWYPDAPGEMVVLTCDTPEEDGITWTLDQSSEVLGSGKTLTIQVKEFGDAGQYTCHKGGEVLSHSLLLLHKKEDGIWSTDILKDQKEPKNKTFLRCEAKNYSGRFTCWWLTTISTDLTFSVKSSRGSSDPQGVTCGAATLSAERVRGDNKEYEYSVECQEDSACPAAEESLPIEVMVDAVHKLKYENYTSSFFIRDIIKPDPPKNLQLKPLKNSRQVEVSWEYPDTWSTPHSYFSLTFCVQVQGKSKREKKDRVFTDKTSATVICRKNASISVRAQDRYYSSSWSEWASVPCSGGGGSGGGGSGGGGSRVIPVSGPARCLSQSRNLLKTTDDMVKTAREKLKHYSCTAEDIDHEDITRDQTSTLKTCLPLELHKNESCLATRETSSTTRGSCLPPQKTSLMMTLCLGSIYEDLKMYQTEFQAINAALQNHNHQQIILDKGMLVAIDELMQSLNHNGETLRQKPPVGEADPYRVKMKLCILLHAFSTRVVTINRVMGYLSSASGGPGPAGLYAQPGSGGGGSGGGGSGGGGSGGGGSGGGGSGGGGSQSVLTQPPSVSGAPGQRVTISCSGSRSNIGDETVKWYQQLPGTAPKLLIYYNDQRPSGVPDRFSGSKSGTSASLAITGLQAEDEADYYCQSYDRYTHPALLFGTGTKVTVLGGGGSGGGGSGGGGSQVQLVESGGGVVQPGRSLRLSCAASGFTFSSYGMHWVRQAPGKGLEWVAFIRYEGSNKYYAESVKGRFTISRDNSKNTLYLQMNSLRAEDTAVYYCKTHGSHDNWGQGTMVTVSS

SEQ ID NO: 466 - protein, 934 aa, Artificial Sequence
  source: /note="Description of Artificial Sequence: Synthetic polypeptide"
EVQLVESGGGLVQPGNSLRLSCAASGFTFSKFGMSWVRQAPGKGLEWVSSISGSGRDTLYAESVKGRFTISRDNAKTTLYLQMNSLRPEDTAVYYCTIGGSLSVSSQGTLVTVSSSGGPGPAGLYAQPGSIWELKKDVYVVELDWYPDAPGEMVVLTCDTPEEDGITWTLDQSSEVLGSGKTLTIQVKEFGDAGQYTCHKGGEVLSHSLLLLHKKEDGIWSTDILKDQKEPKNKTFLRCEAKNYSGRFTCWWLTTISTDLTFSVKSSRGSSDPQGVTCGAATLSAERVRGDNKEYEYSVECQEDSACPAAEESLPIEVMVDAVHKLKYENYTSSFFIRDIIKPDPPKNLQLKPLKNSRQVEVSWEYPDTWSTPHSYFSLTFCVQVQGKSKREKKDRVFTDKTSATVICRKNASISVRAQDRYYSSSWSEWASVPCSGGGGSGGGGSGGGGSRNLPVATPDPGMFPCLHHSQNLLRAVSNMLQKARQTLEFYPCTSEEIDHEDITKDKTSTVEACLPLELTKNESCLNSRETSFITNGSCLASRKTSFMMALCLSSIYEDLKMYQVEFKTMNAKLLMDPKRQIFLDQNMLAVIDELMQALNFNSETVPQKSSLEEPDFYKTKIKLCILLHAFRIRAVTIDRVMSYLNASSGGPGPAGLYAQPGSGGGGSGGGGSGGGGSGGGGSGGGGSGGGGSQSVLTQPPSVSGAPGQRVTISCSGSRSNIGDETVKWYQQLPGTAPKLLIYYNDQRPSGVPDRFSGSKSGTSASLAITGLQAEDEADYYCQSYDRYTHPALLFGTGTKVTVLGGGGSGGGGSGGGGSQVQLVESGGGVVQPGRSLRLSCAASGFTFSSYGMHWVRQAPGKGLEWVAFIRYEGSNKYYAESVKGRFTISRDNSKNTLYLQMNSLRAEDTAVYYCKTHGSHDNWGQGTMVTVSS

SEQ ID NO: 467 - protein, 930 aa, Artificial Sequence
  source: /note="Description of Artificial Sequence: Synthetic polypeptide"
EVQLVESGGGLVQPGNSLRLSCAASGFTFSKFGMSWVRQAPGKGLEWVSSISGSGRDTLYAESVKGRFTISRDNAKTTLYLQMNSLRPEDTAVYYCTIGGSLSVSSQGTLVTVSSSGGPGPAGLYAQPGSIWELKKDVYVVELDWYPDAPGEMVVLTCDTPEEDGITWTLDQSSEVLGSGKTLTIQVKEFGDAGQYTCHKGGEVLSHSLLLLHKKEDGIWSTDILKDQKEPKNKTFLRCEAKNYSGRFTCWWLTTISTDLTFSVKSSRGSSDPQGVTCGAATLSAERVRGDNKEYEYSVECQEDSACPAAEESLPIEVMVDAVHKLKYENYTSSFFIRDIIKPDPPKNLQLKPLKNSRQVEVSWEYPDTWSTPHSYFSLTFCVQVQGKSKREKKDRVFTDKTSATVICRKNASISVRAQDRYYSSSWSEWASVPCSGGGGSGGGGSGGGGSRVIPVSGPARCLSQSRNLLKTTDDMVKTAREKLKHYSCTAEDIDHEDITRDQTSTLKTCLPLELHKNESCLATRETSSTTRGSCLPPQKTSLMMTLCLGSIYEDLKMYQTEFQAINAALQNHNHQQIILDKGMLVAIDELMQSLNHNGETLRQKPPVGEADPYRVKMKLCILLHAFSTRVVTINRVMGYLSSASGGPGPAGLYAQPGSGGGGSGGGGSGGGGSGGGGSGGGGSGGGGSQSVLTQPPSVSGAPGQRVTISCSGSESNIGSNDVKWYQQLPGTAPKLLIYYNDQRPSGVPDRFSGSKSGTSASLAITGLQAEDEADYYCQSYDRYTHPALLFGTGTKVTVLGGGGSGGGGSGGGGSQVQLVESGGGVVQPGRSLRLSCAASGFTFSSYGMHWVRQAPGKGLEWVAFIRYDGSNKYYADSVKGRFTISRDNSKNTLYLQMNSLRAEDTAVYYCKTHGSHDNWGQGTMVTVSS

SEQ ID NO: 468 - protein, 934 aa, Artificial Sequence
  source: /note="Description of Artificial Sequence: Synthetic polypeptide"
EVQLVESGGGLVQPGNSLRLSCAASGFTFSKFGMSWVRQAPGKGLEWVSSISGSGRDTLYAESVKGRFTISRDNAKTTLYLQMNSLRPEDTAVYYCTIGGSLSVSSQGTLVTVSSSGGPGPAGLYAQPGSIWELKKDVYVVELDWYPDAPGEMVVLTCDTPEEDGITWTLDQSSEVLGSGKTLTIQVKEFGDAGQYTCHKGGEVLSHSLLLLHKKEDGIWSTDILKDQKEPKNKTFLRCEAKNYSGRFTCWWLTTISTDLTFSVKSSRGSSDPQGVTCGAATLSAERVRGDNKEYEYSVECQEDSACPAAEESLPIEVMVDAVHKLKYENYTSSFFIRDIIKPDPPKNLQLKPLKNSRQVEVSWEYPDTWSTPHSYFSLTFCVQVQGKSKREKKDRVFTDKTSATVICRKNASISVRAQDRYYSSSWSEWASVPCSGGGGSGGGGSGGGGSRNLPVATPDPGMFPCLHHSQNLLRAVSNMLQKARQTLEFYPCTSEEIDHEDITKDKTSTVEACLPLELTKNESCLNSRETSFITNGSCLASRKTSFMMALCLSSIYEDLKMYQVEFKTMNAKLLMDPKRQIFLDQNMLAVIDELMQALNFNSETVPQKSSLEEPDFYKTKIKLCILLHAFRIRAVTIDRVMSYLNASSGGPGPAGLYAQPGSGGGGSGGGGSGGGGSGGGGSGGGGSGGGGSQSVLTQPPSVSGAPGQRVTISCSGSESNIGSNDVKWYQQLPGTAPKLLIYYNDQRPSGVPDRFSGSKSGTSASLAITGLQAEDEADYYCQSYDRYTHPALLFGTGTKVTVLGGGGSGGGGSGGGGSQVQLVESGGGVVQPGRSLRLSCAASGFTFSSYGMHWVRQAPGKGLEWVAFIRYDGSNKYYADSVKGRFTISRDNSKNTLYLQMNSLRAEDTAVYYCKTHGSHDNWGQGTMVTVSS

SEQ ID NO: 469 - protein, 930 aa, Artificial Sequence
  source: /note="Description of Artificial Sequence: Synthetic polypeptide"
EVQLVESGGGLVQPGNSLRLSCAASGFTFSKFGMSWVRQAPGKGLEWVSSISGSGRDTLYAESVKGRFTISRDNAKTTLYLQMNSLRPEDTAVYYCTIGGSLSVSSQGTLVTVSSSGGPGPAGLYAQPGSIWELKKDVYVVELDWYPDAPGEMVVLTCDTPEEDGITWTLDQSSEVLGSGKTLTIQVKEFGDAGQYTCHKGGEVLSHSLLLLHKKEDGIWSTDILKDQKEPKNKTFLRCEAKNYSGRFTCWWLTTISTDLTFSVKSSRGSSDPQGVTCGAATLSAERVRGDNKEYEYSVECQEDSACPAAEESLPIEVMVDAVHKLKYENYTSSFFIRDIIKPDPPKNLQLKPLKNSRQVEVSWEYPDTWSTPHSYFSLTFCVQVQGKSKREKKDRVFTDKTSATVICRKNASISVRAQDRYYSSSWSEWASVPCSGGGGSGGGGSGGGGSRVIPVSGPARCLSQSRNLLKTTDDMVKTAREKLKHYSCTAEDIDHEDITRDQTSTLKTCLPLELHKNESCLATRETSSTTRGSCLPPQKTSLMMTLCLGSIYEDLKMYQTEFQAINAALQNHNHQQIILDKGMLVAIDELMQSLNHNGETLRQKPPVGEADPYRVKMKLCILLHAFSTRVVTINRVMGYLSSASGGPGPAGLYAQPGSGGGGSGGGGSGGGGSGGGGSGGGGSGGGGSQSVLTQPPSVSGAPGQRVTISCSGSRSNIGENTVKWYQQLPGTAPKLLIYYNDQRPSGVPDRFSGSKSGTSASLAITGLQAEDEADYYCQSYDRYTHPALLFGTGTKVTVLGGGGSGGGGSGGGGSQVQLVESGGGVVQPGRSLRLSCAASGFTFSSYGMHWVRQAPGKGLEWVAFIRYEGSNKYYAESVKGRFTISRDNSKNTLYLQMNSLRAEDTAVYYCKTHGSHDNWGQGTMVTVSS

SEQ ID NO: 470 - protein, 934 aa, Artificial Sequence
  source: /note="Description of Artificial Sequence: Synthetic polypeptide"
EVQLVESGGGLVQPGNSLRLSCAASGFTFSKFGMSWVRQAPGKGLEWVSSISGSGRDTLYAESVKGRFTISRDNAKTTLYLQMNSLRPEDTAVYYCTIGGSLSVSSQGTLVTVSSSGGPGPAGLYAQPGSIWELKKDVYVVELDWYPDAPGEMVVLTCDTPEEDGITWTLDQSSEVLGSGKTLTIQVKEFGDAGQYTCHKGGEVLSHSLLLLHKKEDGIWSTDILKDQKEPKNKTFLRCEAKNYSGRFTCWWLTTISTDLTFSVKSSRGSSDPQGVTCGAATLSAERVRGDNKEYEYSVECQEDSACPAAEESLPIEVMVDAVHKLKYENYTSSFFIRDIIKPDPPKNLQLKPLKNSRQVEVSWEYPDTWSTPHSYFSLTFCVQVQGKSKREKKDRVFTDKTSATVICRKNASISVRAQDRYYSSSWSEWASVPCSGGGGSGGGGSGGGGSRNLPVATPDPGMFPCLHHSQNLLRAVSNMLQKARQTLEFYPCTSEEIDHEDITKDKTSTVEACLPLELTKNESCLNSRETSFITNGSCLASRKTSFMMALCLSSIYEDLKMYQVEFKTMNAKLLMDPKRQIFLDQNMLAVIDELMQALNFNSETVPQKSSLEEPDFYKTKIKLCILLHAFRIRAVTIDRVMSYLNASSGGPGPAGLYAQPGSGGGGSGGGGSGGGGSGGGGSGGGGSGGGGSQSVLTQPPSVSGAPGQRVTISCSGSRSNIGENTVKWYQQLPGTAPKLLIYYNDQRPSGVPDRFSGSKSGTSASLAITGLQAEDEADYYCQSYDRYTHPALLFGTGTKVTVLGGGGSGGGGSGGGGSQVQLVESGGGVVQPGRSLRLSCAASGFTFSSYGMHWVRQAPGKGLEWVAFIRYEGSNKYYAESVKGRFTISRDNSKNTLYLQMNSLRAEDTAVYYCKTHGSHDNWGQGTMVTVSS

SEQ ID NO: 471 - protein, 930 aa, Artificial Sequence
  source: /note="Description of Artificial Sequence: Synthetic polypeptide"
EVQLVESGGGLVQPGNSLRLSCAASGFTFSKFGMSWVRQAPGKGLEWVSSISGSGRDTLYAESVKGRFTISRDNAKTTLYLQMNSLRPEDTAVYYCTIGGSLSVSSQGTLVTVSSSGGPGPAGLYAQPGSIWELKKDVYVVELDWYPDAPGEMVVLTCDTPEEDGITWTLDQSSEVLGSGKTLTIQVKEFGDAGQYTCHKGGEVLSHSLLLLHKKEDGIWSTDILKDQKEPKNKTFLRCEAKNYSGRFTCWWLTTISTDLTFSVKSSRGSSDPQGVTCGAATLSAERVRGDNKEYEYSVECQEDSACPAAEESLPIEVMVDAVHKLKYENYTSSFFIRDIIKPDPPKNLQLKPLKNSRQVEVSWEYPDTWSTPHSYFSLTFCVQVQGKSKREKKDRVFTDKTSATVICRKNASISVRAQDRYYSSSWSEWASVPCSGGGGSGGGGSGGGGSRVIPVSGPARCLSQSRNLLKTTDDMVKTAREKLKHYSCTAEDIDHEDITRDQTSTLKTCLPLELHKNESCLATRETSSTTRGSCLPPQKTSLMMTLCLGSIYEDLKMYQTEFQAINAALQNHNHQQIILDKGMLVAIDELMQSLNHNGETLRQKPPVGEADPYRVKMKLCILLHAFSTRVVTINRVMGYLSSASGGPGPAGLYAQPGSGGGGSGGGGSGGGGSGGGGSGGGGSGGGGSQSVLTQPPSVSGAPGQRVTISCSGSRSNIGEETVKWYQQLPGTAPKLLIYYNDQRPSGVPDRFSGSKSGTSASLAITGLQAEDEADYYCQSYDRYTHPALLFGTGTKVTVLGGGGSGGGGSGGGGSQVQLVESGGGVVQPGRSLRLSCAASGFTFSSYGMHWVRQAPGKGLEWVAFIRYDGSNKYYADSVKGRFTISRDNSKNTLYLQMNSLRAEDTAVYYCKTHGSHDNWGQGTMVTVSS

SEQ ID NO: 472 - protein, 934 aa, Artificial Sequence
  source: /note="Description of Artificial Sequence: Synthetic polypeptide"
EVQLVESGGGLVQPGNSLRLSCAASGFTFSKFGMSWVRQAPGKGLEWVSSISGSGRDTLYAESVKGRFTISRDNAKTTLYLQMNSLRPEDTAVYYCTIGGSLSVSSQGTLVTVSSSGGPGPAGLYAQPGSIWELKKDVYVVELDWYPDAPGEMVVLTCDTPEEDGITWTLDQSSEVLGSGKTLTIQVKEFGDAGQYTCHKGGEVLSHSLLLLHKKEDGIWSTDILKDQKEPKNKTFLRCEAKNYSGRFTCWWLTTISTDLTFSVKSSRGSSDPQGVTCGAATLSAERVRGDNKEYEYSVECQEDSACPAAEESLPIEVMVDAVHKLKYENYTSSFFIRDIIKPDPPKNLQLKPLKNSRQVEVSWEYPDTWSTPHSYFSLTFCVQVQGKSKREKKDRVFTDKTSATVICRKNASISVRAQDRYYSSSWSEWASVPCSGGGGSGGGGSGGGGSRNLPVATPDPGMFPCLHHSQNLLRAVSNMLQKARQTLEFYPCTSEEIDHEDITKDKTSTVEACLPLELTKNESCLNSRETSFITNGSCLASRKTSFMMALCLSSIYEDLKMYQVEFKTMNAKLLMDPKRQIFLDQNMLAVIDELMQALNFNSETVPQKSSLEEPDFYKTKIKLCILLHAFRIRAVTIDRVMSYLNASSGGPGPAGLYAQPGSGGGGSGGGGSGGGGSGGGGSGGGGSGGGGSQSVLTQPPSVSGAPGQRVTISCSGSRSNIGEETVKWYQQLPGTAPKLLIYYNDQRPSGVPDRFSGSKSGTSASLAITGLQAEDEADYYCQSYDRYTHPALLFGTGTKVTVLGGGGSGGGGSGGGGSQVQLVESGGGVVQPGRSLRLSCAASGFTFSSYGMHWVRQAPGKGLEWVAFIRYDGSNKYYADSVKGRFTISRDNSKNTLYLQMNSLRAEDTAVYYCKTHGSHDNWGQGTMVTVSS

SEQ ID NO: 473 - protein, 930 aa, Artificial Sequence
  source: /note="Description of Artificial Sequence: Synthetic polypeptide"
EVQLVESGGGLVQPGNSLRLSCAASGFTFSKFGMSWVRQAPGKGLEWVSSISGSGRDTLYAESVKGRFTISRDNAKTTLYLQMNSLRPEDTAVYYCTIGGSLSVSSQGTLVTVSSSGGPGPAGLYAQPGSIWELKKDVYVVELDWYPDAPGEMVVLTCDTPEEDGITWTLDQSSEVLGSGKTLTIQVKEFGDAGQYTCHKGGEVLSHSLLLLHKKEDGIWSTDILKDQKEPKNKTFLRCEAKNYSGRFTCWWLTTISTDLTFSVKSSRGSSDPQGVTCGAATLSAERVRGDNKEYEYSVECQEDSACPAAEESLPIEVMVDAVHKLKYENYTSSFFIRDIIKPDPPKNLQLKPLKNSRQVEVSWEYPDTWSTPHSYFSLTFCVQVQGKSKREKKDRVFTDKTSATVICRKNASISVRAQDRYYSSSWSEWASVPCSGGGGSGGGGSGGGGSRVIPVSGPARCLSQSRNLLKTTDDMVKTAREKLKHYSCTAEDIDHEDITRDQTSTLKTCLPLELHKNESCLATRETSSTTRGSCLPPQKTSLMMTLCLGSIYEDLKMYQTEFQAINAALQNHNHQQIILDKGMLVAIDELMQSLNHNGETLRQKPPVGEADPYRVKMKLCILLHAFSTRVVTINRVMGYLSSASGGPGPAGLYAQPGSGGGGSGGGGSGGGGSGGGGSGGGGSGGGGSQSVLTQPPSVSGAPGQRVTISCSGSRSNIGSETVKWYQQLPGTAPKLLIYYNDQRPSGVPDRFSGSKSGTSASLAITGLQAEDEADYYCQSYDRYTHPALLFGTGTKVTVLGGGGSGGGGSGGGGSQVQLVESGGGVVQPGRSLRLSCAASGFTFSSYGMHWVRQAPGKGLEWVAFIRYEGSNKYYADSVKGRFTISRDNSKNTLYLQMNSLRAEDTAVYYCKTHGSHDNWGQGTMVTVSS

SEQ ID NO: 474 - protein, 934 aa, Artificial Sequence
  source: /note="Description of Artificial Sequence: Synthetic polypeptide"
EVQLVESGGGLVQPGNSLRLSCAASGFTFSKFGMSWVRQAPGKGLEWVSSISGSGRDTLYAESVKGRFTISRDNAKTTLYLQMNSLRPEDTAVYYCTIGGSLSVSSQGTLVTVSSSGGPGPAGLYAQPGSIWELKKDVYVVELDWYPDAPGEMVVLTCDTPEEDGITWTLDQSSEVLGSGKTLTIQVKEFGDAGQYTCHKGGEVLSHSLLLLHKKEDGIWSTDILKDQKEPKNKTFLRCEAKNYSGRFTCWWLTTISTDLTFSVKSSRGSSDPQGVTCGAATLSAERVRGDNKEYEYSVECQEDSACPAAEESLPIEVMVDAVHKLKYENYTSSFFIRDIIKPDPPKNLQLKPLKNSRQVEVSWEYPDTWSTPHSYFSLTFCVQVQGKSKREKKDRVFTDKTSATVICRKNASISVRAQDRYYSSSWSEWASVPCSGGGGSGGGGSGGGGSRNLPVATPDPGMFPCLHHSQNLLRAVSNMLQKARQTLEFYPCTSEEIDHEDITKDKTSTVEACLPLELTKNESCLNSRETSFITNGSCLASRKTSFMMALCLSSIYEDLKMYQVEFKTMNAKLLMDPKRQIFLDQNMLAVIDELMQALNFNSETVPQKSSLEEPDFYKTKIKLCILLHAFRIRAVTIDRVMSYLNASSGGPGPAGLYAQPGSGGGGSGGGGSGGGGSGGGGSGGGGSGGGGSQSVLTQPPSVSGAPGQRVTISCSGSRSNIGSETVKWYQQLPGTAPKLLIYYNDQRPSGVPDRFSGSKSGTSASLAITGLQAEDEADYYCQSYDRYTHPALLFGTGTKVTVLGGGGSGGGGSGGGGSQVQLVESGGGVVQPGRSLRLSCAASGFTFSSYGMHWVRQAPGKGLEWVAFIRYEGSNKYYADSVKGRFTISRDNSKNTLYLQMNSLRAEDTAVYYCKTHGSHDNWGQGTMVTVSS

SEQ ID NO: 475 - protein, 930 aa, Artificial Sequence
  source: /note="Description of Artificial Sequence: Synthetic polypeptide"
EVQLVESGGGLVQPGNSLRLSCAASGFTFSKFGMSWVRQAPGKGLEWVSSISGSGRDTLYAESVKGRFTISRDNAKTTLYLQMNSLRPEDTAVYYCTIGGSLSVSSQGTLVTVSSSGGPALFKSSFPPGSIWELKKDVYVVELDWYPDAPGEMVVLTCDTPEEDGITWTLDQSSEVLGSGKTLTIQVKEFGDAGQYTCHKGGEVLSHSLLLLHKKEDGIWSTDILKDQKEPKNKTFLRCEAKNYSGRFTCWWLTTISTDLTFSVKSSRGSSDPQGVTCGAATLSAERVRGDNKEYEYSVECQEDSACPAAEESLPIEVMVDAVHKLKYENYTSSFFIRDIIKPDPPKNLQLKPLKNSRQVEVSWEYPDTWSTPHSYFSLTFCVQVQGKSKREKKDRVFTDKTSATVICRKNASISVRAQDRYYSSSWSEWASVPCSGGGGSGGGGSGGGGSRVIPVSGPARCLSQSRNLLKTTDDMVKTAREKLKHYSCTAEDIDHEDITRDQTSTLKTCLPLELHKNESCLATRETSSTTRGSCLPPQKTSLMMTLCLGSIYEDLKMYQTEFQAINAALQNHNHQQIILDKGMLVAIDELMQSLNHNGETLRQKPPVGEADPYRVKMKLCILLHAFSTRVVTINRVMGYLSSASGGPALFKSSFPPGSGGGGSGGGGSGGGGSGGGGSGGGGSGGGGSQSVLTQPPSVSGAPGQRVTISCSGSRSNIGSNTVKWYQQLPGTAPKLLIYYNDQRPSGVPDRFSGSKSGTSASLAITGLQAEDEADYYCQSYDRYTHPALLFGTGTKVTVLGGGGSGGGGSGGGGSQVQLVESGGGVVQPGRSLRLSCAASGFTFSSYGMHWVRQAPGKGLEWVAFIRYEGSNKYYAESVKGRFTISRDNSKNTLYLQMNSLRAEDTAVYYCKTHGSHDNWGQGTMVTVSS

SEQ ID NO: 476 - protein, 934 aa, Artificial Sequence
  source: /note="Description of Artificial Sequence: Synthetic polypeptide"
EVQLVESGGGLVQPGNSLRLSCAASGFTFSKFGMSWVRQAPGKGLEWVSSISGSGRDTLYAESVKGRFTISRDNAKTTLYLQMNSLRPEDTAVYYCTIGGSLSVSSQGTLVTVSSSGGPALFKSSFPPGSIWELKKDVYVVELDWYPDAPGEMVVLTCDTPEEDGITWTLDQSSEVLGSGKTLTIQVKEFGDAGQYTCHKGGEVLSHSLLLLHKKEDGIWSTDILKDQKEPKNKTFLRCEAKNYSGRFTCWWLTTISTDLTFSVKSSRGSSDPQGVTCGAATLSAERVRGDNKEYEYSVECQEDSACPAAEESLPIEVMVDAVHKLKYENYTSSFFIRDIIKPDPPKNLQLKPLKNSRQVEVSWEYPDTWSTPHSYFSLTFCVQVQGKSKREKKDRVFTDKTSATVICRKNASISVRAQDRYYSSSWSEWASVPCSGGGGSGGGGSGGGGSRNLPVATPDPGMFPCLHHSQNLLRAVSNMLQKARQTLEFYPCTSEEIDHEDITKDKTSTVEACLPLELTKNESCLNSRETSFITNGSCLASRKTSFMMALCLSSIYEDLKMYQVEFKTMNAKLLMDPKRQIFLDQNMLAVIDELMQALNFNSETVPQKSSLEEPDFYKTKIKLCILLHAFRIRAVTIDRVMSYLNASSGGPALFKSSFPPGSGGGGSGGGGSGGGGSGGGGSGGGGSGGGGSQSVLTQPPSVSGAPGQRVTISCSGSRSNIGSNTVKWYQQLPGTAPKLLIYYNDQRPSGVPDRFSGSKSGTSASLAITGLQAEDEADYYCQSYDRYTHPALLFGTGTKVTVLGGGGSGGGGSGGGGSQVQLVESGGGVVQPGRSLRLSCAASGFTFSSYGMHWVRQAPGKGLEWVAFIRYEGSNKYYAESVKGRFTISRDNSKNTLYLQMNSLRAEDTAVYYCKTHGSHDNWGQGTMVTVSS

SEQ ID NO: 477 - protein, 930 aa, Artificial Sequence
  source: /note="Description of Artificial Sequence: Synthetic polypeptide"
EVQLVESGGGLVQPGNSLRLSCAASGFTFSKFGMSWVRQAPGKGLEWVSSISGSGRDTLYAESVKGRFTISRDNAKTTLYLQMNSLRPEDTAVYYCTIGGSLSVSSQGTLVTVSSSGGPALFKSSFPPGSIWELKKDVYVVELDWYPDAPGEMVVLTCDTPEEDGITWTLDQSSEVLGSGKTLTIQVKEFGDAGQYTCHKGGEVLSHSLLLLHKKEDGIWSTDILKDQKEPKNKTFLRCEAKNYSGRFTCWWLTTISTDLTFSVKSSRGSSDPQGVTCGAATLSAERVRGDNKEYEYSVECQEDSACPAAEESLPIEVMVDAVHKLKYENYTSSFFIRDIIKPDPPKNLQLKPLKNSRQVEVSWEYPDTWSTPHSYFSLTFCVQVQGKSKREKKDRVFTDKTSATVICRKNASISVRAQDRYYSSSWSEWASVPCSGGGGSGGGGSGGGGSRVIPVSGPARCLSQSRNLLKTTDDMVKTAREKLKHYSCTAEDIDHEDITRDQTSTLKTCLPLELHKNESCLATRETSSTTRGSCLPPQKTSLMMTLCLGSIYEDLKMYQTEFQAINAALQNHNHQQIILDKGMLVAIDELMQSLNHNGETLRQKPPVGEADPYRVKMKLCILLHAFSTRVVTINRVMGYLSSASGGPALFKSSFPPGSGGGGSGGGGSGGGGSGGGGSGGGGSGGGGSQSVLTQPPSVSGAPGQRVTISCSGSRSNIGSETVKWYQQLPGTAPKLLIYYNDQRPSGVPDRFSGSKSGTSASLAITGLQAEDEADYYCQSYDRYTHPALLFGTGTKVTVLGGGGSGGGGSGGGGSQVQLVESGGGVVQPGRSLRLSCAASGFTFSSYGMHWVRQAPGKGLEWVAFIRYEGSNKYYAESVKGRFTISRDNSKNTLYLQMNSLRAEDTAVYYCKTHGSHDNWGQGTMVTVSS

SEQ ID NO: 478 - protein, 930 aa, Artificial Sequence
  source: /note="Description of Artificial Sequence: Synthetic polypeptide"
EVQLVESGGGLVQPGNSLRLSCAASGFTFSKFGMSWVRQAPGKGLEWVSSISGSGRDTLYAESVKGRFTISRDNAKTTLYLQMNSLRPEDTAVYYCTIGGSLSVSSQGTLVTVSSSGGPALFKSSFPPGSIWELKKDVYVVELDWYPDAPGEMVVLTCDTPEEDGITWTLDQSSEVLGSGKTLTIQVKEFGDAGQYTCHKGGEVLSHSLLLLHKKEDGIWSTDILKDQKEPKNKTFLRCEAKNYSGRFTCWWLTTISTDLTFSVKSSRGSSDPQGVTCGAATLSAERVRGDNKEYEYSVECQEDSACPAAEESLPIEVMVDAVHKLKYENYTSSFFIRDIIKPDPPKNLQLKPLKNSRQVEVSWEYPDTWSTPHSYFSLTFCVQVQGKSKREKKDRVFTDKTSATVICRKNASISVRAQDRYYSSSWSEWASVPCSGGGGSGGGGSGGGGSRVIPVSGPARCLSQSRNLLKTTDDMVKTAREKLKHYSCTAEDIDHEDITRDQTSTLKTCLPLELHKNESCLATRETSSTTRGSCLPPQKTSLMMTLCLGSIYEDLKMYQTEFQAINAALQNHNHQQIILDKGMLVAIDELMQSLNHNGETLRQKPPVGEADPYRVKMKLCILLHAFSTRVVTINRVMGYLSSASGGPALFKSSFPPGSGGGGSGGGGSGGGGSGGGGSGGGGSGGGGSQSVLTQPPSVSGAPGQRVTISCSGSRSNIGDNTVKWYQQLPGTAPKLLIYYNDQRPSGVPDRFSGSKSGTSASLAITGLQAEDEADYYCQSYDRYTHPALLFGTGTKVTVLGGGGSGGGGSGGGGSQVQLVESGGGVVQPGRSLRLSCAASGFTFSSYGMHWVRQAPGKGLEWVAFIRYEGSNKYYAESVKGRFTISRDNSKNTLYLQMNSLRAEDTAVYYCKTHGSHDNWGQGTMVTVSS

SEQ ID NO: 479 - protein, 934 aa, Artificial Sequence
  source: /note="Description of Artificial Sequence: Synthetic polypeptide"
EVQLVESGGGLVQPGNSLRLSCAASGFTFSKFGMSWVRQAPGKGLEWVSSISGSGRDTLYAESVKGRFTISRDNAKTTLYLQMNSLRPEDTAVYYCTIGGSLSVSSQGTLVTVSSSGGPALFKSSFPPGSIWELKKDVYVVELDWYPDAPGEMVVLTCDTPEEDGITWTLDQSSEVLGSGKTLTIQVKEFGDAGQYTCHKGGEVLSHSLLLLHKKEDGIWSTDILKDQKEPKNKTFLRCEAKNYSGRFTCWWLTTISTDLTFSVKSSRGSSDPQGVTCGAATLSAERVRGDNKEYEYSVECQEDSACPAAEESLPIEVMVDAVHKLKYENYTSSFFIRDIIKPDPPKNLQLKPLKNSRQVEVSWEYPDTWSTPHSYFSLTFCVQVQGKSKREKKDRVFTDKTSATVICRKNASISVRAQDRYYSSSWSEWASVPCSGGGGSGGGGSGGGGSRNLPVATPDPGMFPCLHHSQNLLRAVSNMLQKARQTLEFYPCTSEEIDHEDITKDKTSTVEACLPLELTKNESCLNSRETSFITNGSCLASRKTSFMMALCLSSIYEDLKMYQVEFKTMNAKLLMDPKRQIFLDQNMLAVIDELMQALNFNSETVPQKSSLEEPDFYKTKIKLCILLHAFRIRAVTIDRVMSYLNASSGGPALFKSSFPPGSGGGGSGGGGSGGGGSGGGGSGGGGSGGGGSQSVLTQPPSVSGAPGQRVTISCSGSRSNIGDNTVKWYQQLPGTAPKLLIYYNDQRPSGVPDRFSGSKSGTSASLAITGLQAEDEADYYCQSYDRYTHPALLFGTGTKVTVLGGGGSGGGGSGGGGSQVQLVESGGGVVQPGRSLRLSCAASGFTFSSYGMHWVRQAPGKGLEWVAFIRYEGSNKYYAESVKGRFTISRDNSKNTLYLQMNSLRAEDTAVYYCKTHGSHDNWGQGTMVTVSS

SEQ ID NO: 480 - protein, 930 aa, Artificial Sequence
  source: /note="Description of Artificial Sequence: Synthetic polypeptide"
EVQLVESGGGLVQPGNSLRLSCAASGFTFSKFGMSWVRQAPGKGLEWVSSISGSGRDTLYAESVKGRFTISRDNAKTTLYLQMNSLRPEDTAVYYCTIGGSLSVSSQGTLVTVSSSGGPALFKSSFPPGSIWELKKDVYVVELDWYPDAPGEMVVLTCDTPEEDGITWTLDQSSEVLGSGKTLTIQVKEFGDAGQYTCHKGGEVLSHSLLLLHKKEDGIWSTDILKDQKEPKNKTFLRCEAKNYSGRFTCWWLTTISTDLTFSVKSSRGSSDPQGVTCGAATLSAERVRGDNKEYEYSVECQEDSACPAAEESLPIEVMVDAVHKLKYENYTSSFFIRDIIKPDPPKNLQLKPLKNSRQVEVSWEYPDTWSTPHSYFSLTFCVQVQGKSKREKKDRVFTDKTSATVICRKNASISVRAQDRYYSSSWSEWASVPCSGGGGSGGGGSGGGGSRVIPVSGPARCLSQSRNLLKTTDDMVKTAREKLKHYSCTAEDIDHEDITRDQTSTLKTCLPLELHKNESCLATRETSSTTRGSCLPPQKTSLMMTLCLGSIYEDLKMYQTEFQAINAALQNHNHQQIILDKGMLVAIDELMQSLNHNGETLRQKPPVGEADPYRVKMKLCILLHAFSTRVVTINRVMGYLSSASGGPALFKSSFPPGSGGGGSGGGGSGGGGSGGGGSGGGGSGGGGSQSVLTQPPSVSGAPGQRVTISCSGSRSNIGDETVKWYQQLPGTAPKLLIYYNDQRPSGVPDRFSGSKSGTSASLAITGLQAEDEADYYCQSYDRYTHPALLFGTGTKVTVLGGGGSGGGGSGGGGSQVQLVESGGGVVQPGRSLRLSCAASGFTFSSYGMHWVRQAPGKGLEWVAFIRYDGSNKYYADSVKGRFTISRDNSKNTLYLQMNSLRAEDTAVYYCKTHGSHDNWGQGTMVTVSS

SEQ ID NO: 481 - protein, 934 aa, Artificial Sequence
  source: /note="Description of Artificial Sequence: Synthetic polypeptide"
EVQLVESGGGLVQPGNSLRLSCAASGFTFSKFGMSWVRQAPGKGLEWVSSISGSGRDTLYAESVKGRFTISRDNAKTTLYLQMNSLRPEDTAVYYCTIGGSLSVSSQGTLVTVSSSGGPALFKSSFPPGSIWELKKDVYVVELDWYPDAPGEMVVLTCDTPEEDGITWTLDQSSEVLGSGKTLTIQVKEFGDAGQYTCHKGGEVLSHSLLLLHKKEDGIWSTDILKDQKEPKNKTFLRCEAKNYSGRFTCWWLTTISTDLTFSVKSSRGSSDPQGVTCGAATLSAERVRGDNKEYEYSVECQEDSACPAAEESLPIEVMVDAVHKLKYENYTSSFFIRDIIKPDPPKNLQLKPLKNSRQVEVSWEYPDTWSTPHSYFSLTFCVQVQGKSKREKKDRVFTDKTSATVICRKNASISVRAQDRYYSSSWSEWASVPCSGGGGSGGGGSGGGGSRNLPVATPDPGMFPCLHHSQNLLRAVSNMLQKARQTLEFYPCTSEEIDHEDITKDKTSTVEACLPLELTKNESCLNSRETSFITNGSCLASRKTSFMMALCLSSIYEDLKMYQVEFKTMNAKLLMDPKRQIFLDQNMLAVIDELMQALNFNSETVPQKSSLEEPDFYKTKIKLCILLHAFRIRAVTIDRVMSYLNASSGGPALFKSSFPPGSGGGGSGGGGSGGGGSGGGGSGGGGSGGGGSQSVLTQPPSVSGAPGQRVTISCSGSRSNIGDETVKWYQQLPGTAPKLLIYYNDQRPSGVPDRFSGSKSGTSASLAITGLQAEDEADYYCQSYDRYTHPALLFGTGTKVTVLGGGGSGGGGSGGGGSQVQLVESGGGVVQPGRSLRLSCAASGFTFSSYGMHWVRQAPGKGLEWVAFIRYDGSNKYYADSVKGRFTISRDNSKNTLYLQMNSLRAEDTAVYYCKTHGSHDNWGQGTMVTVSS

SEQ ID NO: 482 - protein, 930 aa, Artificial Sequence
  source: /note="Description of Artificial Sequence: Synthetic polypeptide"
EVQLVESGGGLVQPGNSLRLSCAASGFTFSKFGMSWVRQAPGKGLEWVSSISGSGRDTLYAESVKGRFTISRDNAKTTLYLQMNSLRPEDTAVYYCTIGGSLSVSSQGTLVTVSSSGGPALFKSSFPPGSIWELKKDVYVVELDWYPDAPGEMVVLTCDTPEEDGITWTLDQSSEVLGSGKTLTIQVKEFGDAGQYTCHKGGEVLSHSLLLLHKKEDGIWSTDILKDQKEPKNKTFLRCEAKNYSGRFTCWWLTTISTDLTFSVKSSRGSSDPQGVTCGAATLSAERVRGDNKEYEYSVECQEDSACPAAEESLPIEVMVDAVHKLKYENYTSSFFIRDIIKPDPPKNLQLKPLKNSRQVEVSWEYPDTWSTPHSYFSLTFCVQVQGKSKREKKDRVFTDKTSATVICRKNASISVRAQDRYYSSSWSEWASVPCSGGGGSGGGGSGGGGSRVIPVSGPARCLSQSRNLLKTTDDMVKTAREKLKHYSCTAEDIDHEDITRDQTSTLKTCLPLELHKNESCLATRETSSTTRGSCLPPQKTSLMMTLCLGSIYEDLKMYQTEFQAINAALQNHNHQQIILDKGMLVAIDELMQSLNHNGETLRQKPPVGEADPYRVKMKLCILLHAFSTRVVTINRVMGYLSSASGGPALFKSSFPPGSGGGGSGGGGSGGGGSGGGGSGGGGSGGGGSQSVLTQPPSVSGAPGQRVTISCSGSRSNIGDETVKWYQQLPGTAPKLLIYYNDQRPSGVPDRFSGSKSGTSASLAITGLQAEDEADYYCQSYDRYTHPALLFGTGTKVTVLGGGGSGGGGSGGGGSQVQLVESGGGVVQPGRSLRLSCAASGFTFSSYGMHWVRQAPGKGLEWVAFIRYEGSNKYYAESVKGRFTISRDNSKNTLYLQMNSLRAEDTAVYYCKTHGSHDNWGQGTMVTVSS

SEQ ID NO: 483 - protein, 934 aa, Artificial Sequence
  source: /note="Description of Artificial Sequence: Synthetic polypeptide"
EVQLVESGGGLVQPGNSLRLSCAASGFTFSKFGMSWVRQAPGKGLEWVSSISGSGRDTLYAESVKGRFTISRDNAKTTLYLQMNSLRPEDTAVYYCTIGGSLSVSSQGTLVTVSSSGGPALFKSSFPPGSIWELKKDVYVVELDWYPDAPGEMVVLTCDTPEEDGITWTLDQSSEVLGSGKTLTIQVKEFGDAGQYTCHKGGEVLSHSLLLLHKKEDGIWSTDILKDQKEPKNKTFLRCEAKNYSGRFTCWWLTTISTDLTFSVKSSRGSSDPQGVTCGAATLSAERVRGDNKEYEYSVECQEDSACPAAEESLPIEVMVDAVHKLKYENYTSSFFIRDIIKPDPPKNLQLKPLKNSRQVEVSWEYPDTWSTPHSYFSLTFCVQVQGKSKREKKDRVFTDKTSATVICRKNASISVRAQDRYYSSSWSEWASVPCSGGGGSGGGGSGGGGSRNLPVATPDPGMFPCLHHSQNLLRAVSNMLQKARQTLEFYPCTSEEIDHEDITKDKTSTVEACLPLELTKNESCLNSRETSFITNGSCLASRKTSFMMALCLSSIYEDLKMYQVEFKTMNAKLLMDPKRQIFLDQNMLAVIDELMQALNFNSETVPQKSSLEEPDFYKTKIKLCILLHAFRIRAVTIDRVMSYLNASSGGPALFKSSFPPGSGGGGSGGGGSGGGGSGGGGSGGGGSGGGGSQSVLTQPPSVSGAPGQRVTISCSGSRSNIGDETVKWYQQLPGTAPKLLIYYNDQRPSGVPDRFSGSKSGTSASLAITGLQAEDEADYYCQSYDRYTHPALLFGTGTKVTVLGGGGSGGGGSGGGGSQVQLVESGGGVVQPGRSLRLSCAASGFTFSSYGMHWVRQAPGKGLEWVAFIRYEGSNKYYAESVKGRFTISRDNSKNTLYLQMNSLRAEDTAVYYCKTHGSHDNWGQGTMVTVSS

SEQ ID NO: 484 - protein, 930 aa, Artificial Sequence
  source: /note="Description of Artificial Sequence: Synthetic polypeptide"
EVQLVESGGGLVQPGNSLRLSCAASGFTFSKFGMSWVRQAPGKGLEWVSSISGSGRDTLYAESVKGRFTISRDNAKTTLYLQMNSLRPEDTAVYYCTIGGSLSVSSQGTLVTVSSSGGPALFKSSFPPGSIWELKKDVYVVELDWYPDAPGEMVVLTCDTPEEDGITWTLDQSSEVLGSGKTLTIQVKEFGDAGQYTCHKGGEVLSHSLLLLHKKEDGIWSTDILKDQKEPKNKTFLRCEAKNYSGRFTCWWLTTISTDLTFSVKSSRGSSDPQGVTCGAATLSAERVRGDNKEYEYSVECQEDSACPAAEESLPIEVMVDAVHKLKYENYTSSFFIRDIIKPDPPKNLQLKPLKNSRQVEVSWEYPDTWSTPHSYFSLTFCVQVQGKSKREKKDRVFTDKTSATVICRKNASISVRAQDRYYSSSWSEWASVPCSGGGGSGGGGSGGGGSRVIPVSGPARCLSQSRNLLKTTDDMVKTAREKLKHYSCTAEDIDHEDITRDQTSTLKTCLPLELHKNESCLATRETSSTTRGSCLPPQKTSLMMTLCLGSIYEDLKMYQTEFQAINAALQNHNHQQIILDKGMLVAIDELMQSLNHNGETLRQKPPVGEADPYRVKMKLCILLHAFSTRVVTINRVMGYLSSASGGPALFKSSFPPGSGGGGSGGGGSGGGGSGGGGSGGGGSGGGGSQSVLTQPPSVSGAPGQRVTISCSGSESNIGSNDVKWYQQLPGTAPKLLIYYNDQRPSGVPDRFSGSKSGTSASLAITGLQAEDEADYYCQSYDRYTHPALLFGTGTKVTVLGGGGSGGGGSGGGGSQVQLVESGGGVVQPGRSLRLSCAASGFTFSSYGMHWVRQAPGKGLEWVAFIRYDGSNKYYADSVKGRFTISRDNSKNTLYLQMNSLRAEDTAVYYCKTHGSHDNWGQGTMVTVSS

SEQ ID NO: 485 - protein, 934 aa, Artificial Sequence
  source: /note="Description of Artificial Sequence: Synthetic polypeptide"
EVQLVESGGGLVQPGNSLRLSCAASGFTFSKFGMSWVRQAPGKGLEWVSSISGSGRDTLYAESVKGRFTISRDNAKTTLYLQMNSLRPEDTAVYYCTIGGSLSVSSQGTLVTVSSSGGPALFKSSFPPGSIWELKKDVYVVELDWYPDAPGEMVVLTCDTPEEDGITWTLDQSSEVLGSGKTLTIQVKEFGDAGQYTCHKGGEVLSHSLLLLHKKEDGIWSTDILKDQKEPKNKTFLRCEAKNYSGRFTCWWLTTISTDLTFSVKSSRGSSDPQGVTCGAATLSAERVRGDNKEYEYSVECQEDSACPAAEESLPIEVMVDAVHKLKYENYTSSFFIRDIIKPDPPKNLQLKPLKNSRQVEVSWEYPDTWSTPHSYFSLTFCVQVQGKSKREKKDRVFTDKTSATVICRKNASISVRAQDRYYSSSWSEWASVPCSGGGGSGGGGSGGGGSRNLPVATPDPGMFPCLHHSQNLLRAVSNMLQKARQTLEFYPCTSEEIDHEDITKDKTSTVEACLPLELTKNESCLNSRETSFITNGSCLASRKTSFMMALCLSSIYEDLKMYQVEFKTMNAKLLMDPKRQIFLDQNMLAVIDELMQALNFNSETVPQKSSLEEPDFYKTKIKLCILLHAFRIRAVTIDRVMSYLNASSGGPALFKSSFPPGSGGGGSGGGGSGGGGSGGGGSGGGGSGGGGSQSVLTQPPSVSGAPGQRVTISCSGSESNIGSNDVKWYQQLPGTAPKLLIYYNDQRPSGVPDRFSGSKSGTSASLAITGLQAEDEADYYCQSYDRYTHPALLFGTGTKVTVLGGGGSGGGGSGGGGSQVQLVESGGGVVQPGRSLRLSCAASGFTFSSYGMHWVRQAPGKGLEWVAFIRYDGSNKYYADSVKGRFTISRDNSKNTLYLQMNSLRAEDTAVYYCKTHGSHDNWGQGTMVTVSS

SEQ ID NO: 486 - protein, 930 aa, Artificial Sequence
  source: /note="Description of Artificial Sequence: Synthetic polypeptide"
EVQLVESGGGLVQPGNSLRLSCAASGFTFSKFGMSWVRQAPGKGLEWVSSISGSGRDTLYAESVKGRFTISRDNAKTTLYLQMNSLRPEDTAVYYCTIGGSLSVSSQGTLVTVSSSGGPALFKSSFPPGSIWELKKDVYVVELDWYPDAPGEMVVLTCDTPEEDGITWTLDQSSEVLGSGKTLTIQVKEFGDAGQYTCHKGGEVLSHSLLLLHKKEDGIWSTDILKDQKEPKNKTFLRCEAKNYSGRFTCWWLTTISTDLTFSVKSSRGSSDPQGVTCGAATLSAERVRGDNKEYEYSVECQEDSACPAAEESLPIEVMVDAVHKLKYENYTSSFFIRDIIKPDPPKNLQLKPLKNSRQVEVSWEYPDTWSTPHSYFSLTFCVQVQGKSKREKKDRVFTDKTSATVICRKNASISVRAQDRYYSSSWSEWASVPCSGGGGSGGGGSGGGGSRVIPVSGPARCLSQSRNLLKTTDDMVKTAREKLKHYSCTAEDIDHEDITRDQTSTLKTCLPLELHKNESCLATRETSSTTRGSCLPPQKTSLMMTLCLGSIYEDLKMYQTEFQAINAALQNHNHQQIILDKGMLVAIDELMQSLNHNGETLRQKPPVGEADPYRVKMKLCILLHAFSTRVVTINRVMGYLSSASGGPALFKSSFPPGSGGGGSGGGGSGGGGSGGGGSGGGGSGGGGSQSVLTQPPSVSGAPGQRVTISCSGSRSNIGENTVKWYQQLPGTAPKLLIYYNDQRPSGVPDRFSGSKSGTSASLAITGLQAEDEADYYCQSYDRYTHPALLFGTGTKVTVLGGGGSGGGGSGGGGSQVQLVESGGGVVQPGRSLRLSCAASGFTFSSYGMHWVRQAPGKGLEWVAFIRYEGSNKYYAESVKGRFTISRDNSKNTLYLQMNSLRAEDTAVYYCKTHGSHDNWGQGTMVTVSS

SEQ ID NO: 487 - protein, 934 aa, Artificial Sequence
  source: /note="Description of Artificial Sequence: Synthetic polypeptide"
EVQLVESGGGLVQPGNSLRLSCAASGFTFSKFGMSWVRQAPGKGLEWVSSISGSGRDTLYAESVKGRFTISRDNAKTTLYLQMNSLRPEDTAVYYCTIGGSLSVSSQGTLVTVSSSGGPALFKSSFPPGSIWELKKDVYVVELDWYPDAPGEMVVLTCDTPEEDGITWTLDQSSEVLGSGKTLTIQVKEFGDAGQYTCHKGGEVLSHSLLLLHKKEDGIWSTDILKDQKEPKNKTFLRCEAKNYSGRFTCWWLTTISTDLTFSVKSSRGSSDPQGVTCGAATLSAERVRGDNKEYEYSVECQEDSACPAAEESLPIEVMVDAVHKLKYENYTSSFFIRDIIKPDPPKNLQLKPLKNSRQVEVSWEYPDTWSTPHSYFSLTFCVQVQGKSKREKKDRVFTDKTSATVICRKNASISVRAQDRYYSSSWSEWASVPCSGGGGSGGGGSGGGGSRNLPVATPDPGMFPCLHHSQNLLRAVSNMLQKARQTLEFYPCTSEEIDHEDITKDKTSTVEACLPLELTKNESCLNSRETSFITNGSCLASRKTSFMMALCLSSIYEDLKMYQVEFKTMNAKLLMDPKRQIFLDQNMLAVIDELMQALNFNSETVPQKSSLEEPDFYKTKIKLCILLHAFRIRAVTIDRVMSYLNASSGGPALFKSSFPPGSGGGGSGGGGSGGGGSGGGGSGGGGSGGGGSQSVLTQPPSVSGAPGQRVTISCSGSRSNIGENTVKWYQQLPGTAPKLLIYYNDQRPSGVPDRFSGSKSGTSASLAITGLQAEDEADYYCQSYDRYTHPALLFGTGTKVTVLGGGGSGGGGSGGGGSQVQLVESGGGVVQPGRSLRLSCAASGFTFSSYGMHWVRQAPGKGLEWVAFIRYEGSNKYYAESVKGRFTISRDNSKNTLYLQMNSLRAEDTAVYYCKTHGSHDNWGQGTMVTVSS

SEQ ID NO: 488 - protein, 930 aa, Artificial Sequence
  source: /note="Description of Artificial Sequence: Synthetic polypeptide"
EVQLVESGGGLVQPGNSLRLSCAASGFTFSKFGMSWVRQAPGKGLEWVSSISGSGRDTLYAESVKGRFTISRDNAKTTLYLQMNSLRPEDTAVYYCTIGGSLSVSSQGTLVTVSSSGGPALFKSSFPPGSIWELKKDVYVVELDWYPDAPGEMVVLTCDTPEEDGITWTLDQSSEVLGSGKTLTIQVKEFGDAGQYTCHKGGEVLSHSLLLLHKKEDGIWSTDILKDQKEPKNKTFLRCEAKNYSGRFTCWWLTTISTDLTFSVKSSRGSSDPQGVTCGAATLSAERVRGDNKEYEYSVECQEDSACPAAEESLPIEVMVDAVHKLKYENYTSSFFIRDIIKPDPPKNLQLKPLKNSRQVEVSWEYPDTWSTPHSYFSLTFCVQVQGKSKREKKDRVFTDKTSATVICRKNASISVRAQDRYYSSSWSEWASVPCSGGGGSGGGGSGGGGSRVIPVSGPARCLSQSRNLLKTTDDMVKTAREKLKHYSCTAEDIDHEDITRDQTSTLKTCLPLELHKNESCLATRETSSTTRGSCLPPQKTSLMMTLCLGSIYEDLKMYQTEFQAINAALQNHNHQQIILDKGMLVAIDELMQSLNHNGETLRQKPPVGEADPYRVKMKLCILLHAFSTRVVTINRVMGYLSSASGGPALFKSSFPPGSGGGGSGGGGSGGGGSGGGGSGGGGSGGGGSQSVLTQPPSVSGAPGQRVTISCSGSRSNIGEETVKWYQQLPGTAPKLLIYYNDQRPSGVPDRFSGSKSGTSASLAITGLQAEDEADYYCQSYDRYTHPALLFGTGTKVTVLGGGGSGGGGSGGGGSQVQLVESGGGVVQPGRSLRLSCAASGFTFSSYGMHWVRQAPGKGLEWVAFIRYDGSNKYYADSVKGRFTISRDNSKNTLYLQMNSLRAEDTAVYYCKTHGSHDNWGQGTMVTVSS

SEQ ID NO: 489 - protein, 934 aa, Artificial Sequence
  source: /note="Description of Artificial Sequence: Synthetic polypeptide"
EVQLVESGGGLVQPGNSLRLSCAASGFTFSKFGMSWVRQAPGKGLEWVSSISGSGRDTLYAESVKGRFTISRDNAKTTLYLQMNSLRPEDTAVYYCTIGGSLSVSSQGTLVTVSSSGGPALFKSSFPPGSIWELKKDVYVVELDWYPDAPGEMVVLTCDTPEEDGITWTLDQSSEVLGSGKTLTIQVKEFGDAGQYTCHKGGEVLSHSLLLLHKKEDGIWSTDILKDQKEPKNKTFLRCEAKNYSGRFTCWWLTTISTDLTFSVKSSRGSSDPQGVTCGAATLSAERVRGDNKEYEYSVECQEDSACPAAEESLPIEVMVDAVHKLKYENYTSSFFIRDIIKPDPPKNLQLKPLKNSRQVEVSWEYPDTWSTPHSYFSLTFCVQVQGKSKREKKDRVFTDKTSATVICRKNASISVRAQDRYYSSSWSEWASVPCSGGGGSGGGGSGGGGSRNLPVATPDPGMFPCLHHSQNLLRAVSNMLQKARQTLEFYPCTSEEIDHEDITKDKTSTVEACLPLELTKNESCLNSRETSFITNGSCLASRKTSFMMALCLSSIYEDLKMYQVEFKTMNAKLLMDPKRQIFLDQNMLAVIDELMQALNFNSETVPQKSSLEEPDFYKTKIKLCILLHAFRIRAVTIDRVMSYLNASSGGPALFKSSFPPGSGGGGSGGGGSGGGGSGGGGSGGGGSGGGGSQSVLTQPPSVSGAPGQRVTISCSGSRSNIGEETVKWYQQLPGTAPKLLIYYNDQRPSGVPDRFSGSKSGTSASLAITGLQAEDEADYYCQSYDRYTHPALLFGTGTKVTVLGGGGSGGGGSGGGGSQVQLVESGGGVVQPGRSLRLSCAASGFTFSSYGMHWVRQAPGKGLEWVAFIRYDGSNKYYADSVKGRFTISRDNSKNTLYLQMNSLRAEDTAVYYCKTHGSHDNWGQGTMVTVSS

SEQ ID NO: 490 - protein, 930 aa, Artificial Sequence
  source: /note="Description of Artificial Sequence: Synthetic polypeptide"
EVQLVESGGGLVQPGNSLRLSCAASGFTFSKFGMSWVRQAPGKGLEWVSSISGSGRDTLYAESVKGRFTISRDNAKTTLYLQMNSLRPEDTAVYYCTIGGSLSVSSQGTLVTVSSSGGPALFKSSFPPGSIWELKKDVYVVELDWYPDAPGEMVVLTCDTPEEDGITWTLDQSSEVLGSGKTLTIQVKEFGDAGQYTCHKGGEVLSHSLLLLHKKEDGIWSTDILKDQKEPKNKTFLRCEAKNYSGRFTCWWLTTISTDLTFSVKSSRGSSDPQGVTCGAATLSAERVRGDNKEYEYSVECQEDSACPAAEESLPIEVMVDAVHKLKYENYTSSFFIRDIIKPDPPKNLQLKPLKNSRQVEVSWEYPDTWSTPHSYFSLTFCVQVQGKSKREKKDRVFTDKTSATVICRKNASISVRAQDRYYSSSWSEWASVPCSGGGGSGGGGSGGGGSRVIPVSGPARCLSQSRNLLKTTDDMVKTAREKLKHYSCTAEDIDHEDITRDQTSTLKTCLPLELHKNESCLATRETSSTTRGSCLPPQKTSLMMTLCLGSIYEDLKMYQTEFQAINAALQNHNHQQIILDKGMLVAIDELMQSLNHNGETLRQKPPVGEADPYRVKMKLCILLHAFSTRVVTINRVMGYLSSASGGPALFKSSFPPGSGGGGSGGGGSGGGGSGGGGSGGGGSGGGGSQSVLTQPPSVSGAPGQRVTISCSGSRSNIGSETVKWYQQLPGTAPKLLIYYNDQRPSGVPDRFSGSKSGTSASLAITGLQAEDEADYYCQSYDRYTHPALLFGTGTKVTVLGGGGSGGGGSGGGGSQVQLVESGGGVVQPGRSLRLSCAASGFTFSSYGMHWVRQAPGKGLEWVAFIRYEGSNKYYADSVKGRFTISRDNSKNTLYLQMNSLRAEDTAVYYCKTHGSHDNWGQGTMVTVSS

SEQ ID NO: 491 - protein, 934 aa, Artificial Sequence
  source: /note="Description of Artificial Sequence: Synthetic polypeptide"
EVQLVESGGGLVQPGNSLRLSCAASGFTFSKFGMSWVRQAPGKGLEWVSSISGSGRDTLYAESVKGRFTISRDNAKTTLYLQMNSLRPEDTAVYYCTIGGSLSVSSQGTLVTVSSSGGPALFKSSFPPGSIWELKKDVYVVELDWYPDAPGEMVVLTCDTPEEDGITWTLDQSSEVLGSGKTLTIQVKEFGDAGQYTCHKGGEVLSHSLLLLHKKEDGIWSTDILKDQKEPKNKTFLRCEAKNYSGRFTCWWLTTISTDLTFSVKSSRGSSDPQGVTCGAATLSAERVRGDNKEYEYSVECQEDSACPAAEESLPIEVMVDAVHKLKYENYTSSFFIRDIIKPDPPKNLQLKPLKNSRQVEVSWEYPDTWSTPHSYFSLTFCVQVQGKSKREKKDRVFTDKTSATVICRKNASISVRAQDRYYSSSWSEWASVPCSGGGGSGGGGSGGGGSRNLPVATPDPGMFPCLHHSQNLLRAVSNMLQKARQTLEFYPCTSEEIDHEDITKDKTSTVEACLPLELTKNESCLNSRETSFITNGSCLASRKTSFMMALCLSSIYEDLKMYQVEFKTMNAKLLMDPKRQIFLDQNMLAVIDELMQALNFNSETVPQKSSLEEPDFYKTKIKLCILLHAFRIRAVTIDRVMSYLNASSGGPALFKSSFPPGSGGGGSGGGGSGGGGSGGGGSGGGGSGGGGSQSVLTQPPSVSGAPGQRVTISCSGSRSNIGSETVKWYQQLPGTAPKLLIYYNDQRPSGVPDRFSGSKSGTSASLAITGLQAEDEADYYCQSYDRYTHPALLFGTGTKVTVLGGGGSGGGGSGGGGSQVQLVESGGGVVQPGRSLRLSCAASGFTFSSYGMHWVRQAPGKGLEWVAFIRYEGSNKYYADSVKGRFTISRDNSKNTLYLQMNSLRAEDTAVYYCKTHGSHDNWGQGTMVTVSS

SEQ ID NO: 492 - protein, 906 aa, Artificial Sequence
  source: /note="Description of Artificial Sequence: Synthetic polypeptide"
EVQLVESGGGLVQPGNSLRLSCAASGFTFSKFGMSWVRQAPGKGLEWVSSISGSGRDTLYAESVKGRFTISRDNAKTTLYLQMNSLRPEDTAVYYCTIGGSLSVSSQGTLVTVSSSGGPGPAGLYAQPGSIWELKKDVYVVELDWYPDAPGEMVVLTCDTPEEDGITWTLDQSSEVLGSGKTLTIQVKEFGDAGQYTCHKGGEVLSHSLLLLHKKEDGIWSTDILKDQKEPKNKTFLRCEAKNYSGRFTCWWLTTISTDLTFSVKSSRGSSDPQGVTCGAATLSAERVRGDNKEYEYSVECQEDSACPAAEESLPIEVMVDAVHKLKYENYTSSFFIRDIIKPDPPKNLQLKPLKNSRQVEVSWEYPDTWSTPHSYFSLTFCVQVQGKSKREKKDRVFTDKTSATVICRKNASISVRAQDRYYSSSWSEWASVPCSGGGGSGGGGSGGGGSRVIPVSGPARCLSQSRNLLKTTDDMVKTAREKLKHYSCTAEDIDHEDITRDQTSTLKTCLPLELHKNESCLATRETSSTTRGSCLPPQKTSLMMTLCLGSIYEDLKMYQTEFQAINAALQNHNHQQIILDKGMLVAIDELMQSLNHNGETLRQKPPVGEADPYRVKMKLCILLHAFSTRVVTINRVMGYLSSASGGPGPAGLYAQPGSGGGGSGGGGSGGGGSGGGGSGGGGSGGGGSQSVLTQPPSVSGAPGQRVTISCSGSRSNIGSNTVKWYQQLPGTAPKLLIYYNDQRPSGVPDRFSGSKSGTSASLAITGLQAEDEADYYCQSYDRYTHPALLFGTGTKVTVLGQPKAAPSVTLFPPSSEELQANKATLVCLISDFYPGAVTVAWKADSSPVKAGVETTTPSKQSNNKYAASSYLSLTPEQWKSHRSYSCQVTHEGSTVEKTVAPTECS

SEQ ID NO: 493 - protein, 910 aa, Artificial Sequence
  source: /note="Description of Artificial Sequence: Synthetic polypeptide"
EVQLVESGGGLVQPGNSLRLSCAASGFTFSKFGMSWVRQAPGKGLEWVSSISGSGRDTLYAESVKGRFTISRDNAKTTLYLQMNSLRPEDTAVYYCTIGGSLSVSSQGTLVTVSSSGGPGPAGLYAQPGSIWELKKDVYVVELDWYPDAPGEMVVLTCDTPEEDGITWTLDQSSEVLGSGKTLTIQVKEFGDAGQYTCHKGGEVLSHSLLLLHKKEDGIWSTDILKDQKEPKNKTFLRCEAKNYSGRFTCWWLTTISTDLTFSVKSSRGSSDPQGVTCGAATLSAERVRGDNKEYEYSVECQEDSACPAAEESLPIEVMVDAVHKLKYENYTSSFFIRDIIKPDPPKNLQLKPLKNSRQVEVSWEYPDTWSTPHSYFSLTFCVQVQGKSKREKKDRVFTDKTSATVICRKNASISVRAQDRYYSSSWSEWASVPCSGGGGSGGGGSGGGGSRNLPVATPDPGMFPCLHHSQNLLRAVSNMLQKARQTLEFYPCTSEEIDHEDITKDKTSTVEACLPLELTKNESCLNSRETSFITNGSCLASRKTSFMMALCLSSIYEDLKMYQVEFKTMNAKLLMDPKRQIFLDQNMLAVIDELMQALNFNSETVPQKSSLEEPDFYKTKIKLCILLHAFRIRAVTIDRVMSYLNASSGGPGPAGLYAQPGSGGGGSGGGGSGGGGSGGGGSGGGGSGGGGSQSVLTQPPSVSGAPGQRVTISCSGSRSNIGSNTVKWYQQLPGTAPKLLIYYNDQRPSGVPDRFSGSKSGTSASLAITGLQAEDEADYYCQSYDRYTHPALLFGTGTKVTVLGQPKAAPSVTLFPPSSEELQANKATLVCLISDFYPGAVTVAWKADSSPVKAGVETTTPSKQSNNKYAASSYLSLTPEQWKSHRSYSCQVTHEGSTVEKTVAPTECS

SEQ ID NO: 494 - protein, 906 aa, Artificial Sequence
  source: /note="Description of Artificial Sequence: Synthetic polypeptide"
EVQLVESGGGLVQPGNSLRLSCAASGFTFSKFGMSWVRQAPGKGLEWVSSISGSGRDTLYAESVKGRFTISRDNAKTTLYLQMNSLRPEDTAVYYCTIGGSLSVSSQGTLVTVSSSGGPGPAGLYAQPGSIWELKKDVYVVELDWYPDAPGEMVVLTCDTPEEDGITWTLDQSSEVLGSGKTLTIQVKEFGDAGQYTCHKGGEVLSHSLLLLHKKEDGIWSTDILKDQKEPKNKTFLRCEAKNYSGRFTCWWLTTISTDLTFSVKSSRGSSDPQGVTCGAATLSAERVRGDNKEYEYSVECQEDSACPAAEESLPIEVMVDAVHKLKYENYTSSFFIRDIIKPDPPKNLQLKPLKNSRQVEVSWEYPDTWSTPHSYFSLTFCVQVQGKSKREKKDRVFTDKTSATVICRKNASISVRAQDRYYSSSWSEWASVPCSGGGGSGGGGSGGGGSRVIPVSGPARCLSQSRNLLKTTDDMVKTAREKLKHYSCTAEDIDHEDITRDQTSTLKTCLPLELHKNESCLATRETSSTTRGSCLPPQKTSLMMTLCLGSIYEDLKMYQTEFQAINAALQNHNHQQIILDKGMLVAIDELMQSLNHNGETLRQKPPVGEADPYRVKMKLCILLHAFSTRVVTINRVMGYLSSASGGPGPAGLYAQPGSGGGGSGGGGSGGGGSGGGGSGGGGSGGGGSQSVLTQPPSVSGAPGQRVTISCSGSRSNIGSETVKWYQQLPGTAPKLLIYYNDQRPSGVPDRFSGSKSGTSASLAITGLQAEDEADYYCQSYDRYTHPALLFGTGTKVTVLGQPKAAPSVTLFPPSSEELQANKATLVCLISDFYPGAVTVAWKADSSPVKAGVETTTPSKQSNNKYAASSYLSLTPEQWKSHRSYSCQVTHEGSTVEKTVAPTECS

SEQ ID NO: 495 - protein, 910 aa, Artificial Sequence
  source: /note="Description of Artificial Sequence: Synthetic polypeptide"
EVQLVESGGGLVQPGNSLRLSCAASGFTFSKFGMSWVRQAPGKGLEWVSSISGSGRDTLYAESVKGRFTISRDNAKTTLYLQMNSLRPEDTAVYYCTIGGSLSVSSQGTLVTVSSSGGPGPAGLYAQPGSIWELKKDVYVVELDWYPDAPGEMVVLTCDTPEEDGITWTLDQSSEVLGSGKTLTIQVKEFGDAGQYTCHKGGEVLSHSLLLLHKKEDGIWSTDILKDQKEPKNKTFLRCEAKNYSGRFTCWWLTTISTDLTFSVKSSRGSSDPQGVTCGAATLSAERVRGDNKEYEYSVECQEDSACPAAEESLPIEVMVDAVHKLKYENYTSSFFIRDIIKPDPPKNLQLKPLKNSRQVEVSWEYPDTWSTPHSYFSLTFCVQVQGKSKREKKDRVFTDKTSATVICRKNASISVRAQDRYYSSSWSEWASVPCSGGGGSGGGGSGGGGSRNLPVATPDPGMFPCLHHSQNLLRAVSNMLQKARQTLEFYPCTSEEIDHEDITKDKTSTVEACLPLELTKNESCLNSRETSFITNGSCLASRKTSFMMALCLSSIYEDLKMYQVEFKTMNAKLLMDPKRQIFLDQNMLAVIDELMQALNFNSETVPQKSSLEEPDFYKTKIKLCILLHAFRIRAVTIDRVMSYLNASSGGPGPAGLYAQPGSGGGGSGGGGSGGGGSGGGGSGGGGSGGGGSQSVLTQPPSVSGAPGQRVTISCSGSRSNIGSETVKWYQQLPGTAPKLLIYYNDQRPSGVPDRFSGSKSGTSASLAITGLQAEDEADYYCQSYDRYTHPALLFGTGTKVTVLGQPKAAPSVTLFPPSSEELQANKATLVCLISDFYPGAVTVAWKADSSPVKAGVETTTPSKQSNNKYAASSYLSLTPEQWKSHRSYSCQVTHEGSTVEKTVAPTECS

SEQ ID NO: 496 - protein, 906 aa, Artificial Sequence
  source: /note="Description of Artificial Sequence: Synthetic polypeptide"
EVQLVESGGGLVQPGNSLRLSCAASGFTFSKFGMSWVRQAPGKGLEWVSSISGSGRDTLYAESVKGRFTISRDNAKTTLYLQMNSLRPEDTAVYYCTIGGSLSVSSQGTLVTVSSSGGPGPAGLYAQPGSIWELKKDVYVVELDWYPDAPGEMVVLTCDTPEEDGITWTLDQSSEVLGSGKTLTIQVKEFGDAGQYTCHKGGEVLSHSLLLLHKKEDGIWSTDILKDQKEPKNKTFLRCEAKNYSGRFTCWWLTTISTDLTFSVKSSRGSSDPQGVTCGAATLSAERVRGDNKEYEYSVECQEDSACPAAEESLPIEVMVDAVHKLKYENYTSSFFIRDIIKPDPPKNLQLKPLKNSRQVEVSWEYPDTWSTPHSYFSLTFCVQVQGKSKREKKDRVFTDKTSATVICRKNASISVRAQDRYYSSSWSEWASVPCSGGGGSGGGGSGGGGSRVIPVSGPARCLSQSRNLLKTTDDMVKTAREKLKHYSCTAEDIDHEDITRDQTSTLKTCLPLELHKNESCLATRETSSTTRGSCLPPQKTSLMMTLCLGSIYEDLKMYQTEFQAINAALQNHNHQQIILDKGMLVAIDELMQSLNHNGETLRQKPPVGEADPYRVKMKLCILLHAFSTRVVTINRVMGYLSSASGGPGPAGLYAQPGSGGGGSGGGGSGGGGSGGGGSGGGGSGGGGSQSVLTQPPSVSGAPGQRVTISCSGSRSNIGDNTVKWYQQLPGTAPKLLIYYNDQRPSGVPDRFSGSKSGTSASLAITGLQAEDEADYYCQSYDRYTHPALLFGTGTKVTVLGQPKAAPSVTLFPPSSEELQANKATLVCLISDFYPGAVTVAWKADSSPVKAGVETTTPSKQSNNKYAASSYLSLTPEQWKSHRSYSCQVTHEGSTVEKTVAPTECS

SEQ ID NO: 497 - protein, 910 aa, Artificial Sequence
  source: /note="Description of Artificial Sequence: Synthetic polypeptide"
EVQLVESGGGLVQPGNSLRLSCAASGFTFSKFGMSWVRQAPGKGLEWVSSISGSGRDTLYAESVKGRFTISRDNAKTTLYLQMNSLRPEDTAVYYCTIGGSLSVSSQGTLVTVSSSGGPGPAGLYAQPGSIWELKKDVYVVELDWYPDAPGEMVVLTCDTPEEDGITWTLDQSSEVLGSGKTLTIQVKEFGDAGQYTCHKGGEVLSHSLLLLHKKEDGIWSTDILKDQKEPKNKTFLRCEAKNYSGRFTCWWLTTISTDLTFSVKSSRGSSDPQGVTCGAATLSAERVRGDNKEYEYSVECQEDSACPAAEESLPIEVMVDAVHKLKYENYTSSFFIRDIIKPDPPKNLQLKPLKNSRQVEVSWEYPDTWSTPHSYFSLTFCVQVQGKSKREKKDRVFTDKTSATVICRKNASISVRAQDRYYSSSWSEWASVPCSGGGGSGGGGSGGGGSRNLPVATPDPGMFPCLHHSQNLLRAVSNMLQKARQTLEFYPCTSEEIDHEDITKDKTSTVEACLPLELTKNESCLNSRETSFITNGSCLASRKTSFMMALCLSSIYEDLKMYQVEFKTMNAKLLMDPKRQIFLDQNMLAVIDELMQALNFNSETVPQKSSLEEPDFYKTKIKLCILLHAFRIRAVTIDRVMSYLNASSGGPGPAGLYAQPGSGGGGSGGGGSGGGGSGGGGSGGGGSGGGGSQSVLTQPPSVSGAPGQRVTISCSGSRSNIGDNTVKWYQQLPGTAPKLLIYYNDQRPSGVPDRFSGSKSGTSASLAITGLQAEDEADYYCQSYDRYTHPALLFGTGTKVTVLGQPKAAPSVTLFPPSSEELQANKATLVCLISDFYPGAVTVAWKADSSPVKAGVETTTPSKQSNNKYAASSYLSLTPEQWKSHRSYSCQVTHEGSTVEKTVAPTECS

SEQ ID NO: 498 - protein, 906 aa, Artificial Sequence
  source: /note="Description of Artificial Sequence: Synthetic polypeptide"
EVQLVESGGGLVQPGNSLRLSCAASGFTFSKFGMSWVRQAPGKGLEWVSSISGSGRDTLYAESVKGRFTISRDNAKTTLYLQMNSLRPEDTAVYYCTIGGSLSVSSQGTLVTVSSSGGPGPAGLYAQPGSIWELKKDVYVVELDWYPDAPGEMVVLTCDTPEEDGITWTLDQSSEVLGSGKTLTIQVKEFGDAGQYTCHKGGEVLSHSLLLLHKKEDGIWSTDILKDQKEPKNKTFLRCEAKNYSGRFTCWWLTTISTDLTFSVKSSRGSSDPQGVTCGAATLSAERVRGDNKEYEYSVECQEDSACPAAEESLPIEVMVDAVHKLKYENYTSSFFIRDIIKPDPPKNLQLKPLKNSRQVEVSWEYPDTWSTPHSYFSLTFCVQVQGKSKREKKDRVFTDKTSATVICRKNASISVRAQDRYYSSSWSEWASVPCSGGGGSGGGGSGGGGSRVIPVSGPARCLSQSRNLLKTTDDMVKTAREKLKHYSCTAEDIDHEDITRDQTSTLKTCLPLELHKNESCLATRETSSTTRGSCLPPQKTSLMMTLCLGSIYEDLKMYQTEFQAINAALQNHNHQQIILDKGMLVAIDELMQSLNHNGETLRQKPPVGEADPYRVKMKLCILLHAFSTRVVTINRVMGYLSSASGGPGPAGLYAQPGSGGGGSGGGGSGGGGSGGGGSGGGGSGGGGSQSVLTQPPSVSGAPGQRVTISCSGSRSNIGDETVKWYQQLPGTAPKLLIYYNDQRPSGVPDRFSGSKSGTSASLAITGLQAEDEADYYCQSYDRYTHPALLFGTGTKVTVLGQPKAAPSVTLFPPSSEELQANKATLVCLISDFYPGAVTVAWKADSSPVKAGVETTTPSKQSNNKYAASSYLSLTPEQWKSHRSYSCQVTHEGSTVEKTVAPTECS

SEQ ID NO: 499 - protein, 910 aa, Artificial Sequence
  source: /note="Description of Artificial Sequence: Synthetic polypeptide"
EVQLVESGGGLVQPGNSLRLSCAASGFTFSKFGMSWVRQAPGKGLEWVSSISGSGRDTLYAESVKGRFTISRDNAKTTLYLQMNSLRPEDTAVYYCTIGGSLSVSSQGTLVTVSSSGGPGPAGLYAQPGSIWELKKDVYVVELDWYPDAPGEMVVLTCDTPEEDGITWTLDQSSEVLGSGKTLTIQVKEFGDAGQYTCHKGGEVLSHSLLLLHKKEDGIWSTDILKDQKEPKNKTFLRCEAKNYSGRFTCWWLTTISTDLTFSVKSSRGSSDPQGVTCGAATLSAERVRGDNKEYEYSVECQEDSACPAAEESLPIEVMVDAVHKLKYENYTSSFFIRDIIKPDPPKNLQLKPLKNSRQVEVSWEYPDTWSTPHSYFSLTFCVQVQGKSKREKKDRVFTDKTSATVICRKNASISVRAQDRYYSSSWSEWASVPCSGGGGSGGGGSGGGGSRNLPVATPDPGMFPCLHHSQNLLRAVSNMLQKARQTLEFYPCTSEEIDHEDITKDKTSTVEACLPLELTKNESCLNSRETSFITNGSCLASRKTSFMMALCLSSIYEDLKMYQVEFKTMNAKLLMDPKRQIFLDQNMLAVIDELMQALNFNSETVPQKSSLEEPDFYKTKIKLCILLHAFRIRAVTIDRVMSYLNASSGGPGPAGLYAQPGSGGGGSGGGGSGGGGSGGGGSGGGGSGGGGSQSVLTQPPSVSGAPGQRVTISCSGSRSNIGDETVKWYQQLPGTAPKLLIYYNDQRPSGVPDRFSGSKSGTSASLAITGLQAEDEADYYCQSYDRYTHPALLFGTGTKVTVLGQPKAAPSVTLFPPSSEELQANKATLVCLISDFYPGAVTVAWKADSSPVKAGVETTTPSKQSNNKYAASSYLSLTPEQWKSHRSYSCQVTHEGSTVEKTVAPTECS

SEQ ID NO: 500 - protein, 906 aa, Artificial Sequence
  source: /note="Description of Artificial Sequence: Synthetic polypeptide"
EVQLVESGGGLVQPGNSLRLSCAASGFTFSKFGMSWVRQAPGKGLEWVSSISGSGRDTLYAESVKGRFTISRDNAKTTLYLQMNSLRPEDTAVYYCTIGGSLSVSSQGTLVTVSSSGGPGPAGLYAQPGSIWELKKDVYVVELDWYPDAPGEMVVLTCDTPEEDGITWTLDQSSEVLGSGKTLTIQVKEFGDAGQYTCHKGGEVLSHSLLLLHKKEDGIWSTDILKDQKEPKNKTFLRCEAKNYSGRFTCWWLTTISTDLTFSVKSSRGSSDPQGVTCGAATLSAERVRGDNKEYEYSVECQEDSACPAAEESLPIEVMVDAVHKLKYENYTSSFFIRDIIKPDPPKNLQLKPLKNSRQVEVSWEYPDTWSTPHSYFSLTFCVQVQGKSKREKKDRVFTDKTSATVICRKNASISVRAQDRYYSSSWSEWASVPCSGGGGSGGGGSGGGGSRVIPVSGPARCLSQSRNLLKTTDDMVKTAREKLKHYSCTAEDIDHEDITRDQTSTLKTCLPLELHKNESCLATRETSSTTRGSCLPPQKTSLMMTLCLGSIYEDLKMYQTEFQAINAALQNHNHQQIILDKGMLVAIDELMQSLNHNGETLRQKPPVGEADPYRVKMKLCILLHAFSTRVVTINRVMGYLSSASGGPGPAGLYAQPGSGGGGSGGGGSGGGGSGGGGSGGGGSGGGGSQSVLTQPPSVSGAPGQRVTISCSGSESNIGSNDVKWYQQLPGTAPKLLIYYNDQRPSGVPDRFSGSKSGTSASLAITGLQAEDEADYYCQSYDRYTHPALLFGTGTKVTVLGQPKAAPSVTLFPPSSEELQANKATLVCLISDFYPGAVTVAWKADSSPVKAGVETTTPSKQSNNKYAASSYLSLTPEQWKSHRSYSCQVTHEGSTVEKTVAPTECS

SEQ ID NO: 501 - protein, 910 aa, Artificial Sequence
  source: /note="Description of Artificial Sequence: Synthetic polypeptide"
EVQLVESGGGLVQPGNSLRLSCAASGFTFSKFGMSWVRQAPGKGLEWVSSISGSGRDTLYAESVKGRFTISRDNAKTTLYLQMNSLRPEDTAVYYCTIGGSLSVSSQGTLVTVSSSGGPGPAGLYAQPGSIWELKKDVYVVELDWYPDAPGEMVVLTCDTPEEDGITWTLDQSSEVLGSGKTLTIQVKEFGDAGQYTCHKGGEVLSHSLLLLHKKEDGIWSTDILKDQKEPKNKTFLRCEAKNYSGRFTCWWLTTISTDLTFSVKSSRGSSDPQGVTCGAATLSAERVRGDNKEYEYSVECQEDSACPAAEESLPIEVMVDAVHKLKYENYTSSFFIRDIIKPDPPKNLQLKPLKNSRQVEVSWEYPDTWSTPHSYFSLTFCVQVQGKSKREKKDRVFTDKTSATVICRKNASISVRAQDRYYSSSWSEWASVPCSGGGGSGGGGSGGGGSRNLPVATPDPGMFPCLHHSQNLLRAVSNMLQKARQTLEFYPCTSEEIDHEDITKDKTSTVEACLPLELTKNESCLNSRETSFITNGSCLASRKTSFMMALCLSSIYEDLKMYQVEFKTMNAKLLMDPKRQIFLDQNMLAVIDELMQALNFNSETVPQKSSLEEPDFYKTKIKLCILLHAFRIRAVTIDRVMSYLNASSGGPGPAGLYAQPGSGGGGSGGGGSGGGGSGGGGSGGGGSGGGGSQSVLTQPPSVSGAPGQRVTISCSGSESNIGSNDVKWYQQLPGTAPKLLIYYNDQRPSGVPDRFSGSKSGTSASLAITGLQAEDEADYYCQSYDRYTHPALLFGTGTKVTVLGQPKAAPSVTLFPPSSEELQANKATLVCLISDFYPGAVTVAWKADSSPVKAGVETTTPSKQSNNKYAASSYLSLTPEQWKSHRSYSCQVTHEGSTVEKTVAPTECS

SEQ ID NO: 502 - protein, 906 aa, Artificial Sequence
  source: /note="Description of Artificial Sequence: Synthetic polypeptide"
EVQLVESGGGLVQPGNSLRLSCAASGFTFSKFGMSWVRQAPGKGLEWVSSISGSGRDTLYAESVKGRFTISRDNAKTTLYLQMNSLRPEDTAVYYCTIGGSLSVSSQGTLVTVSSSGGPGPAGLYAQPGSIWELKKDVYVVELDWYPDAPGEMVVLTCDTPEEDGITWTLDQSSEVLGSGKTLTIQVKEFGDAGQYTCHKGGEVLSHSLLLLHKKEDGIWSTDILKDQKEPKNKTFLRCEAKNYSGRFTCWWLTTISTDLTFSVKSSRGSSDPQGVTCGAATLSAERVRGDNKEYEYSVECQEDSACPAAEESLPIEVMVDAVHKLKYENYTSSFFIRDIIKPDPPKNLQLKPLKNSRQVEVSWEYPDTWSTPHSYFSLTFCVQVQGKSKREKKDRVFTDKTSATVICRKNASISVRAQDRYYSSSWSEWASVPCSGGGGSGGGGSGGGGSRVIPVSGPARCLSQSRNLLKTTDDMVKTAREKLKHYSCTAEDIDHEDITRDQTSTLKTCLPLELHKNESCLATRETSSTTRGSCLPPQKTSLMMTLCLGSIYEDLKMYQTEFQAINAALQNHNHQQIILDKGMLVAIDELMQSLNHNGETLRQKPPVGEADPYRVKMKLCILLHAFSTRVVTINRVMGYLSSASGGPGPAGLYAQPGSGGGGSGGGGSGGGGSGGGGSGGGGSGGGGSQSVLTQPPSVSGAPGQRVTISCSGSRSNIGENTVKWYQQLPGTAPKLLIYYNDQRPSGVPDRFSGSKSGTSASLAITGLQAEDEADYYCQSYDRYTHPALLFGTGTKVTVLGQPKAAPSVTLFPPSSEELQANKATLVCLISDFYPGAVTVAWKADSSPVKAGVETTTPSKQSNNKYAASSYLSLTPEQWKSHRSYSCQVTHEGSTVEKTVAPTECS

SEQ ID NO: 503 - protein, 910 aa, Artificial Sequence
  source: /note="Description of Artificial Sequence: Synthetic polypeptide"
EVQLVESGGGLVQPGNSLRLSCAASGFTFSKFGMSWVRQAPGKGLEWVSSISGSGRDTLYAESVKGRFTISRDNAKTTLYLQMNSLRPEDTAVYYCTIGGSLSVSSQGTLVTVSSSGGPGPAGLYAQPGSIWELKKDVYVVELDWYPDAPGEMVVLTCDTPEEDGITWTLDQSSEVLGSGKTLTIQVKEFGDAGQYTCHKGGEVLSHSLLLLHKKEDGIWSTDILKDQKEPKNKTFLRCEAKNYSGRFTCWWLTTISTDLTFSVKSSRGSSDPQGVTCGAATLSAERVRGDNKEYEYSVECQEDSACPAAEESLPIEVMVDAVHKLKYENYTSSFFIRDIIKPDPPKNLQLKPLKNSRQVEVSWEYPDTWSTPHSYFSLTFCVQVQGKSKREKKDRVFTDKTSATVICRKNASISVRAQDRYYSSSWSEWASVPCSGGGGSGGGGSGGGGSRNLPVATPDPGMFPCLHHSQNLLRAVSNMLQKARQTLEFYPCTSEEIDHEDITKDKTSTVEACLPLELTKNESCLNSRETSFITNGSCLASRKTSFMMALCLSSIYEDLKMYQVEFKTMNAKLLMDPKRQIFLDQNMLAVIDELMQALNFNSETVPQKSSLEEPDFYKTKIKLCILLHAFRIRAVTIDRVMSYLNASSGGPGPAGLYAQPGSGGGGSGGGGSGGGGSGGGGSGGGGSGGGGSQSVLTQPPSVSGAPGQRVTISCSGSRSNIGENTVKWYQQLPGTAPKLLIYYNDQRPSGVPDRFSGSKSGTSASLAITGLQAEDEADYYCQSYDRYTHPALLFGTGTKVTVLGQPKAAPSVTLFPPSSEELQANKATLVCLISDFYPGAVTVAWKADSSPVKAGVETTTPSKQSNNKYAASSYLSLTPEQWKSHRSYSCQVTHEGSTVEKTVAPTECS

SEQ ID NO: 504 - protein, 906 aa, Artificial Sequence
  source: /note="Description of Artificial Sequence: Synthetic polypeptide"
EVQLVESGGGLVQPGNSLRLSCAASGFTFSKFGMSWVRQAPGKGLEWVSSISGSGRDTLYAESVKGRFTISRDNAKTTLYLQMNSLRPEDTAVYYCTIGGSLSVSSQGTLVTVSSSGGPGPAGLYAQPGSIWELKKDVYVVELDWYPDAPGEMVVLTCDTPEEDGITWTLDQSSEVLGSGKTLTIQVKEFGDAGQYTCHKGGEVLSHSLLLLHKKEDGIWSTDILKDQKEPKNKTFLRCEAKNYSGRFTCWWLTTISTDLTFSVKSSRGSSDPQGVTCGAATLSAERVRGDNKEYEYSVECQEDSACPAAEESLPIEVMVDAVHKLKYENYTSSFFIRDIIKPDPPKNLQLKPLKNSRQVEVSWEYPDTWSTPHSYFSLTFCVQVQGKSKREKKDRVFTDKTSATVICRKNASISVRAQDRYYSSSWSEWASVPCSGGGGSGGGGSGGGGSRVIPVSGPARCLSQSRNLLKTTDDMVKTAREKLKHYSCTAEDIDHEDITRDQTSTLKTCLPLELHKNESCLATRETSSTTRGSCLPPQKTSLMMTLCLGSIYEDLKMYQTEFQAINAALQNHNHQQIILDKGMLVAIDELMQSLNHNGETLRQKPPVGEADPYRVKMKLCILLHAFSTRVVTINRVMGYLSSASGGPGPAGLYAQPGSGGGGSGGGGSGGGGSGGGGSGGGGSGGGGSQSVLTQPPSVSGAPGQRVTISCSGSRSNIGEETVKWYQQLPGTAPKLLIYYNDQRPSGVPDRFSGSKSGTSASLAITGLQAEDEADYYCQSYDRYTHPALLFGTGTKVTVLGQPKAAPSVTLFPPSSEELQANKATLVCLISDFYPGAVTVAWKADSSPVKAGVETTTPSKQSNNKYAASSYLSLTPEQWKSHRSYSCQVTHEGSTVEKTVAPTECS

SEQ ID NO: 505 - protein, 910 aa, Artificial Sequence
  source: /note="Description of Artificial Sequence: Synthetic polypeptide"
EVQLVESGGGLVQPGNSLRLSCAASGFTFSKFGMSWVRQAPGKGLEWVSSISGSGRDTLYAESVKGRFTISRDNAKTTLYLQMNSLRPEDTAVYYCTIGGSLSVSSQGTLVTVSSSGGPGPAGLYAQPGSIWELKKDVYVVELDWYPDAPGEMVVLTCDTPEEDGITWTLDQSSEVLGSGKTLTIQVKEFGDAGQYTCHKGGEVLSHSLLLLHKKEDGIWSTDILKDQKEPKNKTFLRCEAKNYSGRFTCWWLTTISTDLTFSVKSSRGSSDPQGVTCGAATLSAERVRGDNKEYEYSVECQEDSACPAAEESLPIEVMVDAVHKLKYENYTSSFFIRDIIKPDPPKNLQLKPLKNSRQVEVSWEYPDTWSTPHSYFSLTFCVQVQGKSKREKKDRVFTDKTSATVICRKNASISVRAQDRYYSSSWSEWASVPCSGGGGSGGGGSGGGGSRNLPVATPDPGMFPCLHHSQNLLRAVSNMLQKARQTLEFYPCTSEEIDHEDITKDKTSTVEACLPLELTKNESCLNSRETSFITNGSCLASRKTSFMMALCLSSIYEDLKMYQVEFKTMNAKLLMDPKRQIFLDQNMLAVIDELMQALNFNSETVPQKSSLEEPDFYKTKIKLCILLHAFRIRAVTIDRVMSYLNASSGGPGPAGLYAQPGSGGGGSGGGGSGGGGSGGGGSGGGGSGGGGSQSVLTQPPSVSGAPGQRVTISCSGSRSNIGEETVKWYQQLPGTAPKLLIYYNDQRPSGVPDRFSGSKSGTSASLAITGLQAEDEADYYCQSYDRYTHPALLFGTGTKVTVLGQPKAAPSVTLFPPSSEELQANKATLVCLISDFYPGAVTVAWKADSSPVKAGVETTTPSKQSNNKYAASSYLSLTPEQWKSHRSYSCQVTHEGSTVEKTVAPTECS

SEQ ID NO: 506 - protein, 906 aa, Artificial Sequence
  source: /note="Description of Artificial Sequence: Synthetic polypeptide"
EVQLVESGGGLVQPGNSLRLSCAASGFTFSKFGMSWVRQAPGKGLEWVSSISGSGRDTLYAESVKGRFTISRDNAKTTLYLQMNSLRPEDTAVYYCTIGGSLSVSSQGTLVTVSSSGGPALFKSSFPPGSIWELKKDVYVVELDWYPDAPGEMVVLTCDTPEEDGITWTLDQSSEVLGSGKTLTIQVKEFGDAGQYTCHKGGEVLSHSLLLLHKKEDGIWSTDILKDQKEPKNKTFLRCEAKNYSGRFTCWWLTTISTDLTFSVKSSRGSSDPQGVTCGAATLSAERVRGDNKEYEYSVECQEDSACPAAEESLPIEVMVDAVHKLKYENYTSSFFIRDIIKPDPPKNLQLKPLKNSRQVEVSWEYPDTWSTPHSYFSLTFCVQVQGKSKREKKDRVFTDKTSATVICRKNASISVRAQDRYYSSSWSEWASVPCSGGGGSGGGGSGGGGSRVIPVSGPARCLSQSRNLLKTTDDMVKTAREKLKHYSCTAEDIDHEDITRDQTSTLKTCLPLELHKNESCLATRETSSTTRGSCLPPQKTSLMMTLCLGSIYEDLKMYQTEFQAINAALQNHNHQQIILDKGMLVAIDELMQSLNHNGETLRQKPPVGEADPYRVKMKLCILLHAFSTRVVTINRVMGYLSSASGGPALFKSSFPPGSGGGGSGGGGSGGGGSGGGGSGGGGSGGGGSQSVLTQPPSVSGAPGQRVTISCSGSRSNIGSNTVKWYQQLPGTAPKLLIYYNDQRPSGVPDRFSGSKSGTSASLAITGLQAEDEADYYCQSYDRYTHPALLFGTGTKVTVLGQPKAAPSVTLFPPSSEELQANKATLVCLISDFYPGAVTVAWKADSSPVKAGVETTTPSKQSNNKYAASSYLSLTPEQWKSHRSYSCQVTHEGSTVEKTVAPTECS

SEQ ID NO: 507 - protein, 910 aa, Artificial Sequence
  source: /note="Description of Artificial Sequence: Synthetic polypeptide"
EVQLVESGGGLVQPGNSLRLSCAASGFTFSKFGMSWVRQAPGKGLEWVSSISGSGRDTLYAESVKGRFTISRDNAKTTLYLQMNSLRPEDTAVYYCTIGGSLSVSSQGTLVTVSSSGGPALFKSSFPPGSIWELKKDVYVVELDWYPDAPGEMVVLTCDTPEEDGITWTLDQSSEVLGSGKTLTIQVKEFGDAGQYTCHKGGEVLSHSLLLLHKKEDGIWSTDILKDQKEPKNKTFLRCEAKNYSGRFTCWWLTTISTDLTFSVKSSRGSSDPQGVTCGAATLSAERVRGDNKEYEYSVECQEDSACPAAEESLPIEVMVDAVHKLKYENYTSSFFIRDIIKPDPPKNLQLKPLKNSRQVEVSWEYPDTWSTPHSYFSLTFCVQVQGKSKREKKDRVFTDKTSATVICRKNASISVRAQDRYYSSSWSEWASVPCSGGGGSGGGGSGGGGSRNLPVATPDPGMFPCLHHSQNLLRAVSNMLQKARQTLEFYPCTSEEIDHEDITKDKTSTVEACLPLELTKNESCLNSRETSFITNGSCLASRKTSFMMALCLSSIYEDLKMYQVEFKTMNAKLLMDPKRQIFLDQNMLAVIDELMQALNFNSETVPQKSSLEEPDFYKTKIKLCILLHAFRIRAVTIDRVMSYLNASSGGPALFKSSFPPGSGGGGSGGGGSGGGGSGGGGSGGGGSGGGGSQSVLTQPPSVSGAPGQRVTISCSGSRSNIGSNTVKWYQQLPGTAPKLLIYYNDQRPSGVPDRFSGSKSGTSASLAITGLQAEDEADYYCQSYDRYTHPALLFGTGTKVTVLGQPKAAPSVTLFPPSSEELQANKATLVCLISDFYPGAVTVAWKADSSPVKAGVETTTPSKQSNNKYAASSYLSLTPEQWKSHRSYSCQVTHEGSTVEKTVAPTECS

SEQ ID NO: 508 - protein, 906 aa, Artificial Sequence
  source: /note="Description of Artificial Sequence: Synthetic polypeptide"
EVQLVESGGGLVQPGNSLRLSCAASGFTFSKFGMSWVRQAPGKGLEWVSSISGSGRDTLYAESVKGRFTISRDNAKTTLYLQMNSLRPEDTAVYYCTIGGSLSVSSQGTLVTVSSSGGPALFKSSFPPGSIWELKKDVYVVELDWYPDAPGEMVVLTCDTPEEDGITWTLDQSSEVLGSGKTLTIQVKEFGDAGQYTCHKGGEVLSHSLLLLHKKEDGIWSTDILKDQKEPKNKTFLRCEAKNYSGRFTCWWLTTISTDLTFSVKSSRGSSDPQGVTCGAATLSAERVRGDNKEYEYSVECQEDSACPAAEESLPIEVMVDAVHKLKYENYTSSFFIRDIIKPDPPKNLQLKPLKNSRQVEVSWEYPDTWSTPHSYFSLTFCVQVQGKSKREKKDRVFTDKTSATVICRKNASISVRAQDRYYSSSWSEWASVPCSGGGGSGGGGSGGGGSRVIPVSGPARCLSQSRNLLKTTDDMVKTAREKLKHYSCTAEDIDHEDITRDQTSTLKTCLPLELHKNESCLATRETSSTTRGSCLPPQKTSLMMTLCLGSIYEDLKMYQTEFQAINAALQNHNHQQIILDKGMLVAIDELMQSLNHNGETLRQKPPVGEADPYRVKMKLCILLHAFSTRVVTINRVMGYLSSASGGPALFKSSFPPGSGGGGSGGGGSGGGGSGGGGSGGGGSGGGGSQSVLTQPPSVSGAPGQRVTISCSGSRSNIGSETVKWYQQLPGTAPKLLIYYNDQRPSGVPDRFSGSKSGTSASLAITGLQAEDEADYYCQSYDRYTHPALLFGTGTKVTVLGQPKAAPSVTLFPPSSEELQANKATLVCLISDFYPGAVTVAWKADSSPVKAGVETTTPSKQSNNKYAASSYLSLTPEQWKSHRSYSCQVTHEGSTVEKTVAPTECS

SEQ ID NO: 509 - protein, 910 aa, Artificial Sequence
  source: /note="Description of Artificial Sequence: Synthetic polypeptide"
EVQLVESGGGLVQPGNSLRLSCAASGFTFSKFGMSWVRQAPGKGLEWVSSISGSGRDTLYAESVKGRFTISRDNAKTTLYLQMNSLRPEDTAVYYCTIGGSLSVSSQGTLVTVSSSGGPALFKSSFPPGSIWELKKDVYVVELDWYPDAPGEMVVLTCDTPEEDGITWTLDQSSEVLGSGKTLTIQVKEFGDAGQYTCHKGGEVLSHSLLLLHKKEDGIWSTDILKDQKEPKNKTFLRCEAKNYSGRFTCWWLTTISTDLTFSVKSSRGSSDPQGVTCGAATLSAERVRGDNKEYEYSVECQEDSACPAAEESLPIEVMVDAVHKLKYENYTSSFFIRDIIKPDPPKNLQLKPLKNSRQVEVSWEYPDTWSTPHSYFSLTFCVQVQGKSKREKKDRVFTDKTSATVICRKNASISVRAQDRYYSSSWSEWASVPCSGGGGSGGGGSGGGGSRNLPVATPDPGMFPCLHHSQNLLRAVSNMLQKARQTLEFYPCTSEEIDHEDITKDKTSTVEACLPLELTKNESCLNSRETSFITNGSCLASRKTSFMMALCLSSIYEDLKMYQVEFKTMNAKLLMDPKRQIFLDQNMLAVIDELMQALNFNSETVPQKSSLEEPDFYKTKIKLCILLHAFRIRAVTIDRVMSYLNASSGGPALFKSSFPPGSGGGGSGGGGSGGGGSGGGGSGGGGSGGGGSQSVLTQPPSVSGAPGQRVTISCSGSRSNIGSETVKWYQQLPGTAPKLLIYYNDQRPSGVPDRFSGSKSGTSASLAITGLQAEDEADYYCQSYDRYTHPALLFGTGTKVTVLGQPKAAPSVTLFPPSSEELQANKATLVCLISDFYPGAVTVAWKADSSPVKAGVETTTPSKQSNNKYAASSYLSLTPEQWKSHRSYSCQVTHEGSTVEKTVAPTECS

SEQ ID NO: 510 - protein, 906 aa, Artificial Sequence
  source: /note="Description of Artificial Sequence: Synthetic polypeptide"
EVQLVESGGGLVQPGNSLRLSCAASGFTFSKFGMSWVRQAPGKGLEWVSSISGSGRDTLYAESVKGRFTISRDNAKTTLYLQMNSLRPEDTAVYYCTIGGSLSVSSQGTLVTVSSSGGPALFKSSFPPGSIWELKKDVYVVELDWYPDAPGEMVVLTCDTPEEDGITWTLDQSSEVLGSGKTLTIQVKEFGDAGQYTCHKGGEVLSHSLLLLHKKEDGIWSTDILKDQKEPKNKTFLRCEAKNYSGRFTCWWLTTISTDLTFSVKSSRGSSDPQGVTCGAATLSAERVRGDNKEYEYSVECQEDSACPAAEESLPIEVMVDAVHKLKYENYTSSFFIRDIIKPDPPKNLQLKPLKNSRQVEVSWEYPDTWSTPHSYFSLTFCVQVQGKSKREKKDRVFTDKTSATVICRKNASISVRAQDRYYSSSWSEWASVPCSGGGGSGGGGSGGGGSRVIPVSGPARCLSQSRNLLKTTDDMVKTAREKLKHYSCTAEDIDHEDITRDQTSTLKTCLPLELHKNESCLATRETSSTTRGSCLPPQKTSLMMTLCLGSIYEDLKMYQTEFQAINAALQNHNHQQIILDKGMLVAIDELMQSLNHNGETLRQKPPVGEADPYRVKMKLCILLHAFSTRVVTINRVMGYLSSASGGPALFKSSFPPGSGGGGSGGGGSGGGGSGGGGSGGGGSGGGGSQSVLTQPPSVSGAPGQRVTISCSGSRSNIGDNTVKWYQQLPGTAPKLLIYYNDQRPSGVPDRFSGSKSGTSASLAITGLQAEDEADYYCQSYDRYTHPALLFGTGTKVTVLGQPKAAPSVTLFPPSSEELQANKATLVCLISDFYPGAVTVAWKADSSPVKAGVETTTPSKQSNNKYAASSYLSLTPEQWKSHRSYSCQVTHEGSTVEKTVAPTECS

SEQ ID NO: 511 - protein, 910 aa, Artificial Sequence
  source: /note="Description of Artificial Sequence: Synthetic polypeptide"
EVQLVESGGGLVQPGNSLRLSCAASGFTFSKFGMSWVRQAPGKGLEWVSSISGSGRDTLYAESVKGRFTISRDNAKTTLYLQMNSLRPEDTAVYYCTIGGSLSVSSQGTLVTVSSSGGPALFKSSFPPGSIWELKKDVYVVELDWYPDAPGEMVVLTCDTPEEDGITWTLDQSSEVLGSGKTLTIQVKEFGDAGQYTCHKGGEVLSHSLLLLHKKEDGIWSTDILKDQKEPKNKTFLRCEAKNYSGRFTCWWLTTISTDLTFSVKSSRGSSDPQGVTCGAATLSAERVRGDNKEYEYSVECQEDSACPAAEESLPIEVMVDAVHKLKYENYTSSFFIRDIIKPDPPKNLQLKPLKNSRQVEVSWEYPDTWSTPHSYFSLTFCVQVQGKSKREKKDRVFTDKTSATVICRKNASISVRAQDRYYSSSWSEWASVPCSGGGGSGGGGSGGGGSRNLPVATPDPGMFPCLHHSQNLLRAVSNMLQKARQTLEFYPCTSEEIDHEDITKDKTSTVEACLPLELTKNESCLNSRETSFITNGSCLASRKTSFMMALCLSSIYEDLKMYQVEFKTMNAKLLMDPKRQIFLDQNMLAVIDELMQALNFNSETVPQKSSLEEPDFYKTKIKLCILLHAFRIRAVTIDRVMSYLNASSGGPALFKSSFPPGSGGGGSGGGGSGGGGSGGGGSGGGGSGGGGSQSVLTQPPSVSGAPGQRVTISCSGSRSNIGDNTVKWYQQLPGTAPKLLIYYNDQRPSGVPDRFSGSKSGTSASLAITGLQAEDEADYYCQSYDRYTHPALLFGTGTKVTVLGQPKAAPSVTLFPPSSEELQANKATLVCLISDFYPGAVTVAWKADSSPVKAGVETTTPSKQSNNKYAASSYLSLTPEQWKSHRSYSCQVTHEGSTVEKTVAPTECS

SEQ ID NO: 512 - protein, 906 aa, Artificial Sequence
  source: /note="Description of Artificial Sequence: Synthetic polypeptide"
EVQLVESGGGLVQPGNSLRLSCAASGFTFSKFGMSWVRQAPGKGLEWVSSISGSGRDTLYAESVKGRFTISRDNAKTTLYLQMNSLRPEDTAVYYCTIGGSLSVSSQGTLVTVSSSGGPALFKSSFPPGSIWELKKDVYVVELDWYPDAPGEMVVLTCDTPEEDGITWTLDQSSEVLGSGKTLTIQVKEFGDAGQYTCHKGGEVLSHSLLLLHKKEDGIWSTDILKDQKEPKNKTFLRCEAKNYSGRFTCWWLTTISTDLTFSVKSSRGSSDPQGVTCGAATLSAERVRGDNKEYEYSVECQEDSACPAAEESLPIEVMVDAVHKLKYENYTSSFFIRDIIKPDPPKNLQLKPLKNSRQVEVSWEYPDTWSTPHSYFSLTFCVQVQGKSKREKKDRVFTDKTSATVICRKNASISVRAQDRYYSSSWSEWASVPCSGGGGSGGGGSGGGGSRVIPVSGPARCLSQSRNLLKTTDDMVKTAREKLKHYSCTAEDIDHEDITRDQTSTLKTCLPLELHKNESCLATRETSSTTRGSCLPPQKTSLMMTLCLGSIYEDLKMYQTEFQAINAALQNHNHQQIILDKGMLVAIDELMQSLNHNGETLRQKPPVGEADPYRVKMKLCILLHAFSTRVVTINRVMGYLSSASGGPALFKSSFPPGSGGGGSGGGGSGGGGSGGGGSGGGGSGGGGSQSVLTQPPSVSGAPGQRVTISCSGSRSNIGDETVKWYQQLPGTAPKLLIYYNDQRPSGVPDRFSGSKSGTSASLAITGLQAEDEADYYCQSYDRYTHPALLFGTGTKVTVLGQPKAAPSVTLFPPSSEELQANKATLVCLISDFYPGAVTVAWKADSSPVKAGVETTTPSKQSNNKYAASSYLSLTPEQWKSHRSYSCQVTHEGSTVEKTVAPTECS

SEQ ID NO: 513 - protein, 910 aa, Artificial Sequence
  source: /note="Description of Artificial Sequence: Synthetic polypeptide"
EVQLVESGGGLVQPGNSLRLSCAASGFTFSKFGMSWVRQAPGKGLEWVSSISGSGRDTLYAESVKGRFTISRDNAKTTLYLQMNSLRPEDTAVYYCTIGGSLSVSSQGTLVTVSSSGGPALFKSSFPPGSIWELKKDVYVVELDWYPDAPGEMVVLTCDTPEEDGITWTLDQSSEVLGSGKTLTIQVKEFGDAGQYTCHKGGEVLSHSLLLLHKKEDGIWSTDILKDQKEPKNKTFLRCEAKNYSGRFTCWWLTTISTDLTFSVKSSRGSSDPQGVTCGAATLSAERVRGDNKEYEYSVECQEDSACPAAEESLPIEVMVDAVHKLKYENYTSSFFIRDIIKPDPPKNLQLKPLKNSRQVEVSWEYPDTWSTPHSYFSLTFCVQVQGKSKREKKDRVFTDKTSATVICRKNASISVRAQDRYYSSSWSEWASVPCSGGGGSGGGGSGGGGSRNLPVATPDPGMFPCLHHSQNLLRAVSNMLQKARQTLEFYPCTSEEIDHEDITKDKTSTVEACLPLELTKNESCLNSRETSFITNGSCLASRKTSFMMALCLSSIYEDLKMYQVEFKTMNAKLLMDPKRQIFLDQNMLAVIDELMQALNFNSETVPQKSSLEEPDFYKTKIKLCILLHAFRIRAVTIDRVMSYLNASSGGPALFKSSFPPGSGGGGSGGGGSGGGGSGGGGSGGGGSGGGGSQSVLTQPPSVSGAPGQRVTISCSGSRSNIGDETVKWYQQLPGTAPKLLIYYNDQRPSGVPDRFSGSKSGTSASLAITGLQAEDEADYYCQSYDRYTHPALLFGTGTKVTVLGQPKAAPSVTLFPPSSEELQANKATLVCLISDFYPGAVTVAWKADSSPVKAGVETTTPSKQSNNKYAASSYLSLTPEQWKSHRSYSCQVTHEGSTVEKTVAPTECS

SEQ ID NO: 514 - protein, 906 aa, Artificial Sequence
  source: /note="Description of Artificial Sequence: Synthetic polypeptide"
EVQLVESGGGLVQPGNSLRLSCAASGFTFSKFGMSWVRQAPGKGLEWVSSISGSGRDTLYAESVKGRFTISRDNAKTTLYLQMNSLRPEDTAVYYCTIGGSLSVSSQGTLVTVSSSGGPALFKSSFPPGSIWELKKDVYVVELDWYPDAPGEMVVLTCDTPEEDGITWTLDQSSEVLGSGKTLTIQVKEFGDAGQYTCHKGGEVLSHSLLLLHKKEDGIWSTDILKDQKEPKNKTFLRCEAKNYSGRFTCWWLTTISTDLTFSVKSSRGSSDPQGVTCGAATLSAERVRGDNKEYEYSVECQEDSACPAAEESLPIEVMVDAVHKLKYENYTSSFFIRDIIKPDPPKNLQLKPLKNSRQVEVSWEYPDTWSTPHSYFSLTFCVQVQGKSKREKKDRVFTDKTSATVICRKNASISVRAQDRYYSSSWSEWASVPCSGGGGSGGGGSGGGGSRVIPVSGPARCLSQSRNLLKTTDDMVKTAREKLKHYSCTAEDIDHEDITRDQTSTLKTCLPLELHKNESCLATRETSSTTRGSCLPPQKTSLMMTLCLGSIYEDLKMYQTEFQAINAALQNHNHQQIILDKGMLVAIDELMQSLNHNGETLRQKPPVGEADPYRVKMKLCILLHAFSTRVVTINRVMGYLSSASGGPALFKSSFPPGSGGGGSGGGGSGGGGSGGGGSGGGGSGGGGSQSVLTQPPSVSGAPGQRVTISCSGSESNIGSNDVKWYQQLPGTAPKLLIYYNDQRPSGVPDRFSGSKSGTSASLAITGLQAEDEADYYCQSYDRYTHPALLFGTGTKVTVLGQPKAAPSVTLFPPSSEELQANKATLVCLISDFYPGAVTVAWKADSSPVKAGVETTTPSKQSNNKYAASSYLSLTPEQWKSHRSYSCQVTHEGSTVEKTVAPTECS

SEQ ID NO: 515 - protein, 910 aa, Artificial Sequence
  source: /note="Description of Artificial Sequence: Synthetic polypeptide"
EVQLVESGGGLVQPGNSLRLSCAASGFTFSKFGMSWVRQAPGKGLEWVSSISGSGRDTLYAESVKGRFTISRDNAKTTLYLQMNSLRPEDTAVYYCTIGGSLSVSSQGTLVTVSSSGGPALFKSSFPPGSIWELKKDVYVVELDWYPDAPGEMVVLTCDTPEEDGITWTLDQSSEVLGSGKTLTIQVKEFGDAGQYTCHKGGEVLSHSLLLLHKKEDGIWSTDILKDQKEPKNKTFLRCEAKNYSGRFTCWWLTTISTDLTFSVKSSRGSSDPQGVTCGAATLSAERVRGDNKEYEYSVECQEDSACPAAEESLPIEVMVDAVHKLKYENYTSSFFIRDIIKPDPPKNLQLKPLKNSRQVEVSWEYPDTWSTPHSYFSLTFCVQVQGKSKREKKDRVFTDKTSATVICRKNASISVRAQDRYYSSSWSEWASVPCSGGGGSGGGGSGGGGSRNLPVATPDPGMFPCLHHSQNLLRAVSNMLQKARQTLEFYPCTSEEIDHEDITKDKTSTVEACLPLELTKNESCLNSRETSFITNGSCLASRKTSFMMALCLSSIYEDLKMYQVEFKTMNAKLLMDPKRQIFLDQNMLAVIDELMQALNFNSETVPQKSSLEEPDFYKTKIKLCILLHAFRIRAVTIDRVMSYLNASSGGPALFKSSFPPGSGGGGSGGGGSGGGGSGGGGSGGGGSGGGGSQSVLTQPPSVSGAPGQRVTISCSGSESNIGSNDVKWYQQLPGTAPKLLIYYNDQRPSGVPDRFSGSKSGTSASLAITGLQAEDEADYYCQSYDRYTHPALLFGTGTKVTVLGQPKAAPSVTLFPPSSEELQANKATLVCLISDFYPGAVTVAWKADSSPVKAGVETTTPSKQSNNKYAASSYLSLTPEQWKSHRSYSCQVTHEGSTVEKTVAPTECS

SEQ ID NO: 516 - protein, 906 aa, Artificial Sequence
  source: /note="Description of Artificial Sequence: Synthetic polypeptide"
EVQLVESGGGLVQPGNSLRLSCAASGFTFSKFGMSWVRQAPGKGLEWVSSISGSGRDTLYAESVKGRFTISRDNAKTTLYLQMNSLRPEDTAVYYCTIGGSLSVSSQGTLVTVSSSGGPALFKSSFPPGSIWELKKDVYVVELDWYPDAPGEMVVLTCDTPEEDGITWTLDQSSEVLGSGKTLTIQVKEFGDAGQYTCHKGGEVLSHSLLLLHKKEDGIWSTDILKDQKEPKNKTFLRCEAKNYSGRFTCWWLTTISTDLTFSVKSSRGSSDPQGVTCGAATLSAERVRGDNKEYEYSVECQEDSACPAAEESLPIEVMVDAVHKLKYENYTSSFFIRDIIKPDPPKNLQLKPLKNSRQVEVSWEYPDTWSTPHSYFSLTFCVQVQGKSKREKKDRVFTDKTSATVICRKNASISVRAQDRYYSSSWSEWASVPCSGGGGSGGGGSGGGGSRVIPVSGPARCLSQSRNLLKTTDDMVKTAREKLKHYSCTAEDIDHEDITRDQTSTLKTCLPLELHKNESCLATRETSSTTRGSCLPPQKTSLMMTLCLGSIYEDLKMYQTEFQAINAALQNHNHQQIILDKGMLVAIDELMQSLNHNGETLRQKPPVGEADPYRVKMKLCILLHAFSTRVVTINRVMGYLSSASGGPALFKSSFPPGSGGGGSGGGGSGGGGSGGGGSGGGGSGGGGSQSVLTQPPSVSGAPGQRVTISCSGSRSNIGENTVKWYQQLPGTAPKLLIYYNDQRPSGVPDRFSGSKSGTSASLAITGLQAEDEADYYCQSYDRYTHPALLFGTGTKVTVLGQPKAAPSVTLFPPSSEELQANKATLVCLISDFYPGAVTVAWKADSSPVKAGVETTTPSKQSNNKYAASSYLSLTPEQWKSHRSYSCQVTHEGSTVEKTVAPTECS

SEQ ID NO: 517 - protein, 910 aa, Artificial Sequence
  source: /note="Description of Artificial Sequence: Synthetic polypeptide"
EVQLVESGGGLVQPGNSLRLSCAASGFTFSKFGMSWVRQAPGKGLEWVSSISGSGRDTLYAESVKGRFTISRDNAKTTLYLQMNSLRPEDTAVYYCTIGGSLSVSSQGTLVTVSSSGGPALFKSSFPPGSIWELKKDVYVVELDWYPDAPGEMVVLTCDTPEEDGITWTLDQSSEVLGSGKTLTIQVKEFGDAGQYTCHKGGEVLSHSLLLLHKKEDGIWSTDILKDQKEPKNKTFLRCEAKNYSGRFTCWWLTTISTDLTFSVKSSRGSSDPQGVTCGAATLSAERVRGDNKEYEYSVECQEDSACPAAEESLPIEVMVDAVHKLKYENYTSSFFIRDIIKPDPPKNLQLKPLKNSRQVEVSWEYPDTWSTPHSYFSLTFCVQVQGKSKREKKDRVFTDKTSATVICRKNASISVRAQDRYYSSSWSEWASVPCSGGGGSGGGGSGGGGSRNLPVATPDPGMFPCLHHSQNLLRAVSNMLQKARQTLEFYPCTSEEIDHEDITKDKTSTVEACLPLELTKNESCLNSRETSFITNGSCLASRKTSFMMALCLSSIYEDLKMYQVEFKTMNAKLLMDPKRQIFLDQNMLAVIDELMQALNFNSETVPQKSSLEEPDFYKTKIKLCILLHAFRIRAVTIDRVMSYLNASSGGPALFKSSFPPGSGGGGSGGGGSGGGGSGGGGSGGGGSGGGGSQSVLTQPPSVSGAPGQRVTISCSGSRSNIGENTVKWYQQLPGTAPKLLIYYNDQRPSGVPDRFSGSKSGTSASLAITGLQAEDEADYYCQSYDRYTHPALLFGTGTKVTVLGQPKAAPSVTLFPPSSEELQANKATLVCLISDFYPGAVTVAWKADSSPVKAGVETTTPSKQSNNKYAASSYLSLTPEQWKSHRSYSCQVTHEGSTVEKTVAPTECS

SEQ ID NO: 518 - protein, 906 aa, Artificial Sequence
  source: /note="Description of Artificial Sequence: Synthetic polypeptide"
EVQLVESGGGLVQPGNSLRLSCAASGFTFSKFGMSWVRQAPGKGLEWVSSISGSGRDTLYAESVKGRFTISRDNAKTTLYLQMNSLRPEDTAVYYCTIGGSLSVSSQGTLVTVSSSGGPALFKSSFPPGSIWELKKDVYVVELDWYPDAPGEMVVLTCDTPEEDGITWTLDQSSEVLGSGKTLTIQVKEFGDAGQYTCHKGGEVLSHSLLLLHKKEDGIWSTDILKDQKEPKNKTFLRCEAKNYSGRFTCWWLTTISTDLTFSVKSSRGSSDPQGVTCGAATLSAERVRGDNKEYEYSVECQEDSACPAAEESLPIEVMVDAVHKLKYENYTSSFFIRDIIKPDPPKNLQLKPLKNSRQVEVSWEYPDTWSTPHSYFSLTFCVQVQGKSKREKKDRVFTDKTSATVICRKNASISVRAQDRYYSSSWSEWASVPCSGGGGSGGGGSGGGGSRVIPVSGPARCLSQSRNLLKTTDDMVKTAREKLKHYSCTAEDIDHEDITRDQTSTLKTCLPLELHKNESCLATRETSSTTRGSCLPPQKTSLMMTLCLGSIYEDLKMYQTEFQAINAALQNHNHQQIILDKGMLVAIDELMQSLNHNGETLRQKPPVGEADPYRVKMKLCILLHAFSTRVVTINRVMGYLSSASGGPALFKSSFPPGSGGGGSGGGGSGGGGSGGGGSGGGGSGGGGSQSVLTQPPSVSGAPGQRVTISCSGSRSNIGEETVKWYQQLPGTAPKLLIYYNDQRPSGVPDRFSGSKSGTSASLAITGLQAEDEADYYCQSYDRYTHPALLFGTGTKVTVLGQPKAAPSVTLFPPSSEELQANKATLVCLISDFYPGAVTVAWKADSSPVKAGVETTTPSKQSNNKYAASSYLSLTPEQWKSHRSYSCQVTHEGSTVEKTVAPTECS

SEQ ID NO: 519 - protein, 910 aa, Artificial Sequence
  source: /note="Description of Artificial Sequence: Synthetic polypeptide"
EVQLVESGGGLVQPGNSLRLSCAASGFTFSKFGMSWVRQAPGKGLEWVSSISGSGRDTLYAESVKGRFTISRDNAKTTLYLQMNSLRPEDTAVYYCTIGGSLSVSSQGTLVTVSSSGGPALFKSSFPPGSIWELKKDVYVVELDWYPDAPGEMVVLTCDTPEEDGITWTLDQSSEVLGSGKTLTIQVKEFGDAGQYTCHKGGEVLSHSLLLLHKKEDGIWSTDILKDQKEPKNKTFLRCEAKNYSGRFTCWWLTTISTDLTFSVKSSRGSSDPQGVTCGAATLSAERVRGDNKEYEYSVECQEDSACPAAEESLPIEVMVDAVHKLKYENYTSSFFIRDIIKPDPPKNLQLKPLKNSRQVEVSWEYPDTWSTPHSYFSLTFCVQVQGKSKREKKDRVFTDKTSATVICRKNASISVRAQDRYYSSSWSEWASVPCSGGGGSGGGGSGGGGSRNLPVATPDPGMFPCLHHSQNLLRAVSNMLQKARQTLEFYPCTSEEIDHEDITKDKTSTVEACLPLELTKNESCLNSRETSFITNGSCLASRKTSFMMALCLSSIYEDLKMYQVEFKTMNAKLLMDPKRQIFLDQNMLAVIDELMQALNFNSETVPQKSSLEEPDFYKTKIKLCILLHAFRIRAVTIDRVMSYLNASSGGPALFKSSFPPGSGGGGSGGGGSGGGGSGGGGSGGGGSGGGGSQSVLTQPPSVSGAPGQRVTISCSGSRSNIGEETVKWYQQLPGTAPKLLIYYNDQRPSGVPDRFSGSKSGTSASLAITGLQAEDEADYYCQSYDRYTHPALLFGTGTKVTVLGQPKAAPSVTLFPPSSEELQANKATLVCLISDFYPGAVTVAWKADSSPVKAGVETTTPSKQSNNKYAASSYLSLTPEQWKSHRSYSCQVTHEGSTVEKTVAPTECS

SEQ ID NO: 520 - protein, 218 aa, Artificial Sequence
  source: /note="Description of Artificial Sequence: Synthetic polypeptide"
QVQLVESGGGVVQPGRSLRLSCAASGFTFSSYGMHWVRQAPGKGLEWVAFIRYDGSNKYYADSVKGRFTISRDNSKNTLYLQMNSLRAEDTAVYYCKTHGSHDNWGQGTMVTVSSASTKGPSVFPLAPSSKSTSGGTAALGCLVKDYFPEPVTVSWNSGALTSGVHTFPAVLQSSGLYSLSSVVTVPSSSLGTQTYICNVNHKPSNTKVDKRVEPKSC

SEQ ID NO: 521 - protein, 218 aa, Artificial Sequence
  source: /note="Description of Artificial Sequence: Synthetic polypeptide"
QVQLVESGGGVVQPGRSLRLSCAASGFTFSSYGMHWVRQAPGKGLEWVAFIRYEGSNKYYAESVKGRFTISRDNSKNTLYLQMNSLRAEDTAVYYCKTHGSHDNWGQGTMVTVSSASTKGPSVFPLAPSSKSTSGGTAALGCLVKDYFPEPVTVSWNSGALTSGVHTFPAVLQSSGLYSLSSVVTVPSSSLGTQTYICNVNHKPSNTKVDKRVEPKSC

SEQ ID NO: 522 - protein, 218 aa, Artificial Sequence
  source: /note="Description of Artificial Sequence: Synthetic polypeptide"
QVQLVESGGGVVQPGRSLRLSCAASGFTFSSYGMHWVRQAPGKGLEWVAFIRYEGSNKYYADSVKGRFTISRDNSKNTLYLQMNSLRAEDTAVYYCKTHGSHDNWGQGTMVTVSSASTKGPSVFPLAPSSKSTSGGTAALGCLVKDYFPEPVTVSWNSGALTSGVHTFPAVLQSSGLYSLSSVVTVPSSSLGTQTYICNVNHKPSNTKVDKRVEPKSC

SEQ ID NO: 523 - protein, 915 aa, Artificial Sequence
  source: /note="Description of Artificial Sequence: Synthetic polypeptide"
IWELKKDVYVVELDWYPDAPGEMVVLTCDTPEEDGITWTLDQSSEVLGSGKTLTIQVKEFGDAGQYTCHKGGEVLSHSLLLLHKKEDGIWSTDILKDQKEPKNKTFLRCEAKNYSGRFTCWWLTTISTDLTFSVKSSRGSSDPQGVTCGAATLSAERVRGDNKEYEYSVECQEDSACPAAEESLPIEVMVDAVHKLKYENYTSSFFIRDIIKPDPPKNLQLKPLKNSRQVEVSWEYPDTWSTPHSYFSLTFCVQVQGKSKREKKDRVFTDKTSATVICRKNASISVRAQDRYYSSSWSEWASVPCSGGGGSGGGGSGGGGSRVIPVSGPARCLSQSRNLLKTTDDMVKTAREKLKHYSCTAEDIDHEDITRDQTSTLKTCLPLELHKNESCLATRETSSTTRGSCLPPQKTSLMMTLCLGSIYEDLKMYQTEFQAINAALQNHNHQQIILDKGMLVAIDELMQSLNHNGETLRQKPPVGEADPYRVKMKLCILLHAFSTRVVTINRVMGYLSSASGGPGPAGLYAQPGSEVQLVESGGGLVQPGNSLRLSCAASGFTFSKFGMSWVRQAPGKGLEWVSSISGSGRDTLYAESVKGRFTISRDNAKTTLYLQMNSLRPEDTAVYYCTIGGSLSVSSQGTLVTVSSGGGGSGGGGSGGGGSGGGGSGGGGSGGGGSQSVLTQPPSVSGAPGQRVTISCSGSRSNIGSNTVKWYQQLPGTAPKLLIYYNDQRPSGVPDRFSGSKSGTSASLAITGLQAEDEADYYCQSYDRYTHPALLFGTGTKVTVLGGGGSGGGGSGGGGSQVQLVESGGGVVQPGRSLRLSCAASGFTFSSYGMHWVRQAPGKGLEWVAFIRYEGSNKYYAESVKGRFTISRDNSKNTLYLQMNSLRAEDTAVYYCKTHGSHDNWGQGTMVTVSS

SEQ ID NO: 524 - protein, 919 aa, Artificial Sequence
  source: /note="Description of Artificial Sequence: Synthetic polypeptide"
IWELKKDVYVVELDWYPDAPGEMVVLTCDTPEEDGITWTLDQSSEVLGSGKTLTIQVKEFGDAGQYTCHKGGEVLSHSLLLLHKKEDGIWSTDILKDQKEPKNKTFLRCEAKNYSGRFTCWWLTTISTDLTFSVKSSRGSSDPQGVTCGAATLSAERVRGDNKEYEYSVECQEDSACPAAEESLPIEVMVDAVHKLKYENYTSSFFIRDIIKPDPPKNLQLKPLKNSRQVEVSWEYPDTWSTPHSYFSLTFCVQVQGKSKREKKDRVFTDKTSATVICRKNASISVRAQDRYYSSSWSEWASVPCSGGGGSGGGGSGGGGSRNLPVATPDPGMFPCLHHSQNLLRAVSNMLQKARQTLEFYPCTSEEIDHEDITKDKTSTVEACLPLELTKNESCLNSRETSFITNGSCLASRKTSFMMALCLSSIYEDLKMYQVEFKTMNAKLLMDPKRQIFLDQNMLAVIDELMQALNFNSETVPQKSSLEEPDFYKTKIKLCILLHAFRIRAVTIDRVMSYLNASSGGPGPAGLYAQPGSEVQLVESGGGLVQPGNSLRLSCAASGFTFSKFGMSWVRQAPGKGLEWVSSISGSGRDTLYAESVKGRFTISRDNAKTTLYLQMNSLRPEDTAVYYCTIGGSLSVSSQGTLVTVSSGGGGSGGGGSGGGGSGGGGSGGGGSGGGGSQSVLTQPPSVSGAPGQRVTISCSGSRSNIGSNTVKWYQQLPGTAPKLLIYYNDQRPSGVPDRFSGSKSGTSASLAITGLQAEDEADYYCQSYDRYTHPALLFGTGTKVTVLGGGGSGGGGSGGGGSQVQLVESGGGVVQPGRSLRLSCAASGFTFSSYGMHWVRQAPGKGLEWVAFIRYEGSNKYYAESVKGRFTISRDNSKNTLYLQMNSLRAEDTAVYYCKTHGSHDNWGQGTMVTVSS

SEQ ID NO: 525 - protein, 915 aa, Artificial Sequence
  source: /note="Description of Artificial Sequence: Synthetic polypeptide"
IWELKKDVYVVELDWYPDAPGEMVVLTCDTPEEDGITWTLDQSSEVLGSGKTLTIQVKEFGDAGQYTCHKGGEVLSHSLLLLHKKEDGIWSTDILKDQKEPKNKTFLRCEAKNYSGRFTCWWLTTISTDLTFSVKSSRGSSDPQGVTCGAATLSAERVRGDNKEYEYSVECQEDSACPAAEESLPIEVMVDAVHKLKYENYTSSFFIRDIIKPDPPKNLQLKPLKNSRQVEVSWEYPDTWSTPHSYFSLTFCVQVQGKSKREKKDRVFTDKTSATVICRKNASISVRAQDRYYSSSWSEWASVPCSGGGGSGGGGSGGGGSRVIPVSGPARCLSQSRNLLKTTDDMVKTAREKLKHYSCTAEDIDHEDITRDQTSTLKTCLPLELHKNESCLATRETSSTTRGSCLPPQKTSLMMTLCLGSIYEDLKMYQTEFQAINAALQNHNHQQIILDKGMLVAIDELMQSLNHNGETLRQKPPVGEADPYRVKMKLCILLHAFSTRVVTINRVMGYLSSASGGPGPAGLYAQPGSEVQLVESGGGLVQPGNSLRLSCAASGFTFSKFGMSWVRQAPGKGLEWVSSISGSGRDTLYAESVKGRFTISRDNAKTTLYLQMNSLRPEDTAVYYCTIGGSLSVSSQGTLVTVSSGGGGSGGGGSGGGGSGGGGSGGGGSGGGGSQSVLTQPPSVSGAPGQRVTISCSGSRSNIGDETVKWYQQLPGTAPKLLIYYNDQRPSGVPDRFSGSKSGTSASLAITGLQAEDEADYYCQSYDRYTHPALLFGTGTKVTVLGGGGSGGGGSGGGGSQVQLVESGGGVVQPGRSLRLSCAASGFTFSSYGMHWVRQAPGKGLEWVAFIRYEGSNKYYAESVKGRFTISRDNSKNTLYLQMNSLRAEDTAVYYCKTHGSHDNWGQGTMVTVSS

SEQ ID NO: 526 - protein, 919 aa, Artificial Sequence
  source: /note="Description of Artificial Sequence: Synthetic polypeptide"
IWELKKDVYVVELDWYPDAPGEMVVLTCDTPEEDGITWTLDQSSEVLGSGKTLTIQVKEFGDAGQYTCHKGGEVLSHSLLLLHKKEDGIWSTDILKDQKEPKNKTFLRCEAKNYSGRFTCWWLTTISTDLTFSVKSSRGSSDPQGVTCGAATLSAERVRGDNKEYEYSVECQEDSACPAAEESLPIEVMVDAVHKLKYENYTSSFFIRDIIKPDPPKNLQLKPLKNSRQVEVSWEYPDTWSTPHSYFSLTFCVQVQGKSKREKKDRVFTDKTSATVICRKNASISVRAQDRYYSSSWSEWASVPCSGGGGSGGGGSGGGGSRNLPVATPDPGMFPCLHHSQNLLRAVSNMLQKARQTLEFYPCTSEEIDHEDITKDKTSTVEACLPLELTKNESCLNSRETSFITNGSCLASRKTSFMMALCLSSIYEDLKMYQVEFKTMNAKLLMDPKRQIFLDQNMLAVIDELMQALNFNSETVPQKSSLEEPDFYKTKIKLCILLHAFRIRAVTIDRVMSYLNASSGGPGPAGLYAQPGSEVQLVESGGGLVQPGNSLRLSCAASGFTFSKFGMSWVRQAPGKGLEWVSSISGSGRDTLYAESVKGRFTISRDNAKTTLYLQMNSLRPEDTAVYYCTIGGSLSVSSQGTLVTVSSGGGGSGGGGSGGGGSGGGGSGGGGSGGGGSQSVLTQPPSVSGAPGQRVTISCSGSRSNIGDETVKWYQQLPGTAPKLLIYYNDQRPSGVPDRFSGSKSGTSASLAITGLQAEDEADYYCQSYDRYTHPALLFGTGTKVTVLGGGGSGGGGSGGGGSQVQLVESGGGVVQPGRSLRLSCAASGFTFSSYGMHWVRQAPGKGLEWVAFIRYEGSNKYYAESVKGRFTISRDNSKNTLYLQMNSLRAEDTAVYYCKTHGSHDNWGQGTMVTVSS

SEQ ID NO: 527 - protein, 891 aa, Artificial Sequence
  source: /note="Description of Artificial Sequence: Synthetic polypeptide"
IWELKKDVYVVELDWYPDAPGEMVVLTCDTPEEDGITWTLDQSSEVLGSGKTLTIQVKEFGDAGQYTCHKGGEVLSHSLLLLHKKEDGIWSTDILKDQKEPKNKTFLRCEAKNYSGRFTCWWLTTISTDLTFSVKSSRGSSDPQGVTCGAATLSAERVRGDNKEYEYSVECQEDSACPAAEESLPIEVMVDAVHKLKYENYTSSFFIRDIIKPDPPKNLQLKPLKNSRQVEVSWEYPDTWSTPHSYFSLTFCVQVQGKSKREKKDRVFTDKTSATVICRKNASISVRAQDRYYSSSWSEWASVPCSGGGGSGGGGSGGGGSRVIPVSGPARCLSQSRNLLKTTDDMVKTAREKLKHYSCTAEDIDHEDITRDQTSTLKTCLPLELHKNESCLATRETSSTTRGSCLPPQKTSLMMTLCLGSIYEDLKMYQTEFQAINAALQNHNHQQIILDKGMLVAIDELMQSLNHNGETLRQKPPVGEADPYRVKMKLCILLHAFSTRVVTINRVMGYLSSASGGPGPAGLYAQPGSEVQLVESGGGLVQPGNSLRLSCAASGFTFSKFGMSWVRQAPGKGLEWVSSISGSGRDTLYAESVKGRFTISRDNAKTTLYLQMNSLRPEDTAVYYCTIGGSLSVSSQGTLVTVSSGGGGSGGGGSGGGGSGGGGSGGGGSGGGGSQSVLTQPPSVSGAPGQRVTISCSGSRSNIGSNTVKWYQQLPGTAPKLLIYYNDQRPSGVPDRFSGSKSGTSASLAITGLQAEDEADYYCQSYDRYTHPALLFGTGTKVTVLGQPKAAPSVTLFPPSSEELQANKATLVCLISDFYPGAVTVAWKADSSPVKAGVETTTPSKQSNNKYAASSYLSLTPEQWKSHRSYSCQVTHEGSTVEKTVAPTECS

SEQ ID NO: 528 - protein, 895 aa, Artificial Sequence
  source: /note="Description of Artificial Sequence: Synthetic polypeptide"
IWELKKDVYVVELDWYPDAPGEMVVLTCDTPEEDGITWTLDQSSEVLGSGKTLTIQVKEFGDAGQYTCHKGGEVLSHSLLLLHKKEDGIWSTDILKDQKEPKNKTFLRCEAKNYSGRFTCWWLTTISTDLTFSVKSSRGSSDPQGVTCGAATLSAERVRGDNKEYEYSVECQEDSACPAAEESLPIEVMVDAVHKLKYENYTSSFFIRDIIKPDPPKNLQLKPLKNSRQVEVSWEYPDTWSTPHSYFSLTFCVQVQGKSKREKKDRVFTDKTSATVICRKNASISVRAQDRYYSSSWSEWASVPCSGGGGSGGGGSGGGGSRNLPVATPDPGMFPCLHHSQNLLRAVSNMLQKARQTLEFYPCTSEEIDHEDITKDKTSTVEACLPLELTKNESCLNSRETSFITNGSCLASRKTSFMMALCLSSIYEDLKMYQVEFKTMNAKLLMDPKRQIFLDQNMLAVIDELMQALNFNSETVPQKSSLEEPDFYKTKIKLCILLHAFRIRAVTIDRVMSYLNASSGGPGPAGLYAQPGSEVQLVESGGGLVQPGNSLRLSCAASGFTFSKFGMSWVRQAPGKGLEWVSSISGSGRDTLYAESVKGRFTISRDNAKTTLYLQMNSLRPEDTAVYYCTIGGSLSVSSQGTLVTVSSGGGGSGGGGSGGGGSGGGGSGGGGSGGGGSQSVLTQPPSVSGAPGQRVTISCSGSRSNIGSNTVKWYQQLPGTAPKLLIYYNDQRPSGVPDRFSGSKSGTSASLAITGLQAEDEADYYCQSYDRYTHPALLFGTGTKVTVLGQPKAAPSVTLFPPSSEELQANKATLVCLISDFYPGAVTVAWKADSSPVKAGVETTTPSKQSNNKYAASSYLSLTPEQWKSHRSYSCQVTHEGSTVEKTVAPTECS

SEQ ID NO: 529 - protein, 891 aa, Artificial Sequence
  source: /note="Description of Artificial Sequence: Synthetic polypeptide"
IWELKKDVYVVELDWYPDAPGEMVVLTCDTPEEDGITWTLDQSSEVLGSGKTLTIQVKEFGDAGQYTCHKGGEVLSHSLLLLHKKEDGIWSTDILKDQKEPKNKTFLRCEAKNYSGRFTCWWLTTISTDLTFSVKSSRGSSDPQGVTCGAATLSAERVRGDNKEYEYSVECQEDSACPAAEESLPIEVMVDAVHKLKYENYTSSFFIRDIIKPDPPKNLQLKPLKNSRQVEVSWEYPDTWSTPHSYFSLTFCVQVQGKSKREKKDRVFTDKTSATVICRKNASISVRAQDRYYSSSWSEWASVPCSGGGGSGGGGSGGGGSRVIPVSGPARCLSQSRNLLKTTDDMVKTAREKLKHYSCTAEDIDHEDITRDQTSTLKTCLPLELHKNESCLATRETSSTTRGSCLPPQKTSLMMTLCLGSIYEDLKMYQTEFQAINAALQNHNHQQIILDKGMLVAIDELMQSLNHNGETLRQKPPVGEADPYRVKMKLCILLHAFSTRVVTINRVMGYLSSASGGPGPAGLYAQPGSEVQLVESGGGLVQPGNSLRLSCAASGFTFSKFGMSWVRQAPGKGLEWVSSISGSGRDTLYAESVKGRFTISRDNAKTTLYLQMNSLRPEDTAVYYCTIGGSLSVSSQGTLVTVSSGGGGSGGGGSGGGGSGGGGSGGGGSGGGGSQSVLTQPPSVSGAPGQRVTISCSGSRSNIGDETVKWYQQLPGTAPKLLIYYNDQRPSGVPDRFSGSKSGTSASLAITGLQAEDEADYYCQSYDRYTHPALLFGTGTKVTVLGQPKAAPSVTLFPPSSEELQANKATLVCLISDFYPGAVTVAWKADSSPVKAGVETTTPSKQSNNKYAASSYLSLTPEQWKSHRSYSCQVTHEGSTVEKTVAPTECS

SEQ ID NO: 530 - protein, 895 aa, Artificial Sequence
  source: /note="Description of Artificial Sequence: Synthetic polypeptide"
IWELKKDVYVVELDWYPDAPGEMVVLTCDTPEEDGITWTLDQSSEVLGSGKTLTIQVKEFGDAGQYTCHKGGEVLSHSLLLLHKKEDGIWSTDILKDQKEPKNKTFLRCEAKNYSGRFTCWWLTTISTDLTFSVKSSRGSSDPQGVTCGAATLSAERVRGDNKEYEYSVECQEDSACPAAEESLPIEVMVDAVHKLKYENYTSSFFIRDIIKPDPPKNLQLKPLKNSRQVEVSWEYPDTWSTPHSYFSLTFCVQVQGKSKREKKDRVFTDKTSATVICRKNASISVRAQDRYYSSSWSEWASVPCSGGGGSGGGGSGGGGSRNLPVATPDPGMFPCLHHSQNLLRAVSNMLQKARQTLEFYPCTSEEIDHEDITKDKTSTVEACLPLELTKNESCLNSRETSFITNGSCLASRKTSFMMALCLSSIYEDLKMYQVEFKTMNAKLLMDPKRQIFLDQNMLAVIDELMQALNFNSETVPQKSSLEEPDFYKTKIKLCILLHAFRIRAVTIDRVMSYLNASSGGPGPAGLYAQPGSEVQLVESGGGLVQPGNSLRLSCAASGFTFSKFGMSWVRQAPGKGLEWVSSISGSGRDTLYAESVKGRFTISRDNAKTTLYLQMNSLRPEDTAVYYCTIGGSLSVSSQGTLVTVSSGGGGSGGGGSGGGGSGGGGSGGGGSGGGGSQSVLTQPPSVSGAPGQRVTISCSGSRSNIGDETVKWYQQLPGTAPKLLIYYNDQRPSGVPDRFSGSKSGTSASLAITGLQAEDEADYYCQSYDRYTHPALLFGTGTKVTVLGQPKAAPSVTLFPPSSEELQANKATLVCLISDFYPGAVTVAWKADSSPVKAGVETTTPSKQSNNKYAASSYLSLTPEQWKSHRSYSCQVTHEGSTVEKTVAPTECS

SEQ ID NO: 531 - protein, 915 aa, Artificial Sequence
  source: /note="Description of Artificial Sequence: Synthetic polypeptide"
IWELKKDVYVVELDWYPDAPGEMVVLTCDTPEEDGITWTLDQSSEVLGSGKTLTIQVKEFGDAGQYTCHKGGEVLSHSLLLLHKKEDGIWSTDILKDQKEPKNKTFLRCEAKNYSGRFTCWWLTTISTDLTFSVKSSRGSSDPQGVTCGAATLSAERVRGDNKEYEYSVECQEDSACPAAEESLPIEVMVDAVHKLKYENYTSSFFIRDIIKPDPPKNLQLKPLKNSRQVEVSWEYPDTWSTPHSYFSLTFCVQVQGKSKREKKDRVFTDKTSATVICRKNASISVRAQDRYYSSSWSEWASVPCSGGGGSGGGGSGGGGSRVIPVSGPARCLSQSRNLLKTTDDMVKTAREKLKHYSCTAEDIDHEDITRDQTSTLKTCLPLELHKNESCLATRETSSTTRGSCLPPQKTSLMMTLCLGSIYEDLKMYQTEFQAINAALQNHNHQQIILDKGMLVAIDELMQSLNHNGETLRQKPPVGEADPYRVKMKLCILLHAFSTRVVTINRVMGYLSSASGGPALFKSSFPPGSEVQLVESGGGLVQPGNSLRLSCAASGFTFSKFGMSWVRQAPGKGLEWVSSISGSGRDTLYAESVKGRFTISRDNAKTTLYLQMNSLRPEDTAVYYCTIGGSLSVSSQGTLVTVSSGGGGSGGGGSGGGGSGGGGSGGGGSGGGGSQSVLTQPPSVSGAPGQRVTISCSGSRSNIGSNTVKWYQQLPGTAPKLLIYYNDQRPSGVPDRFSGSKSGTSASLAITGLQAEDEADYYCQSYDRYTHPALLFGTGTKVTVLGGGGSGGGGSGGGGSQVQLVESGGGVVQPGRSLRLSCAASGFTFSSYGMHWVRQAPGKGLEWVAFIRYEGSNKYYAESVKGRFTISRDNSKNTLYLQMNSLRAEDTAVYYCKTHGSHDNWGQGTMVTVSS

SEQ ID NO: 532 - protein, 919 aa, Artificial Sequence
  source: /note="Description of Artificial Sequence: Synthetic polypeptide"
IWELKKDVYVVELDWYPDAPGEMVVLTCDTPEEDGITWTLDQSSEVLGSGKTLTIQVKEFGDAGQYTCHKGGEVLSHSLLLLHKKEDGIWSTDILKDQKEPKNKTFLRCEAKNYSGRFTCWWLTTISTDLTFSVKSSRGSSDPQGVTCGAATLSAERVRGDNKEYEYSVECQEDSACPAAEESLPIEVMVDAVHKLKYENYTSSFFIRDIIKPDPPKNLQLKPLKNSRQVEVSWEYPDTWSTPHSYFSLTFCVQVQGKSKREKKDRVFTDKTSATVICRKNASISVRAQDRYYSSSWSEWASVPCSGGGGSGGGGSGGGGSRNLPVATPDPGMFPCLHHSQNLLRAVSNMLQKARQTLEFYPCTSEEIDHEDITKDKTSTVEACLPLELTKNESCLNSRETSFITNGSCLASRKTSFMMALCLSSIYEDLKMYQVEFKTMNAKLLMDPKRQIFLDQNMLAVIDELMQALNFNSETVPQKSSLEEPDFYKTKIKLCILLHAFRIRAVTIDRVMSYLNASSGGPALFKSSFPPGSEVQLVESGGGLVQPGNSLRLSCAASGFTFSKFGMSWVRQAPGKGLEWVSSISGSGRDTLYAESVKGRFTISRDNAKTTLYLQMNSLRPEDTAVYYCTIGGSLSVSSQGTLVTVSSGGGGSGGGGSGGGGSGGGGSGGGGSGGGGSQSVLTQPPSVSGAPGQRVTISCSGSRSNIGSNTVKWYQQLPGTAPKLLIYYNDQRPSGVPDRFSGSKSGTSASLAITGLQAEDEADYYCQSYDRYTHPALLFGTGTKVTVLGGGGSGGGGSGGGGSQVQLVESGGGVVQPGRSLRLSCAASGFTFSSYGMHWVRQAPGKGLEWVAFIRYEGSNKYYAESVKGRFTISRDNSKNTLYLQMNSLRAEDTAVYYCKTHGSHDNWGQGTMVTVSS

SEQ ID NO: 533 - protein, 915 aa, Artificial Sequence
  source: /note="Description of Artificial Sequence: Synthetic polypeptide"
IWELKKDVYVVELDWYPDAPGEMVVLTCDTPEEDGITWTLDQSSEVLGSGKTLTIQVKEFGDAGQYTCHKGGEVLSHSLLLLHKKEDGIWSTDILKDQKEPKNKTFLRCEAKNYSGRFTCWWLTTISTDLTFSVKSSRGSSDPQGVTCGAATLSAERVRGDNKEYEYSVECQEDSACPAAEESLPIEVMVDAVHKLKYENYTSSFFIRDIIKPDPPKNLQLKPLKNSRQVEVSWEYPDTWSTPHSYFSLTFCVQVQGKSKREKKDRVFTDKTSATVICRKNASISVRAQDRYYSSSWSEWASVPCSGGGGSGGGGSGGGGSRVIPVSGPARCLSQSRNLLKTTDDMVKTAREKLKHYSCTAEDIDHEDITRDQTSTLKTCLPLELHKNESCLATRETSSTTRGSCLPPQKTSLMMTLCLGSIYEDLKMYQTEFQAINAALQNHNHQQIILDKGMLVAIDELMQSLNHNGETLRQKPPVGEADPYRVKMKLCILLHAFSTRVVTINRVMGYLSSASGGPALFKSSFPPGSEVQLVESGGGLVQPGNSLRLSCAASGFTFSKFGMSWVRQAPGKGLEWVSSISGSGRDTLYAESVKGRFTISRDNAKTTLYLQMNSLRPEDTAVYYCTIGGSLSVSSQGTLVTVSSGGGGSGGGGSGGGGSGGGGSGGGGSGGGGSQSVLTQPPSVSGAPGQRVTISCSGSRSNIGDETVKWYQQLPGTAPKLLIYYNDQRPSGVPDRFSGSKSGTSASLAITGLQAEDEADYYCQSYDRYTHPALLFGTGTKVTVLGGGGSGGGGSGGGGSQVQLVESGGGVVQPGRSLRLSCAASGFTFSSYGMHWVRQAPGKGLEWVAFIRYEGSNKYYAESVKGRFTISRDNSKNTLYLQMNSLRAEDTAVYYCKTHGSHDNWGQGTMVTVSS

SEQ ID NO: 534 - protein, 919 aa, Artificial Sequence
  source: /note="Description of Artificial Sequence: Synthetic polypeptide"
IWELKKDVYVVELDWYPDAPGEMVVLTCDTPEEDGITWTLDQSSEVLGSGKTLTIQVKEFGDAGQYTCHKGGEVLSHSLLLLHKKEDGIWSTDILKDQKEPKNKTFLRCEAKNYSGRFTCWWLTTISTDLTFSVKSSRGSSDPQGVTCGAATLSAERVRGDNKEYEYSVECQEDSACPAAEESLPIEVMVDAVHKLKYENYTSSFFIRDIIKPDPPKNLQLKPLKNSRQVEVSWEYPDTWSTPHSYFSLTFCVQVQGKSKREKKDRVFTDKTSATVICRKNASISVRAQDRYYSSSWSEWASVPCSGGGGSGGGGSGGGGSRNLPVATPDPGMFPCLHHSQNLLRAVSNMLQKARQTLEFYPCTSEEIDHEDITKDKTSTVEACLPLELTKNESCLNSRETSFITNGSCLASRKTSFMMALCLSSIYEDLKMYQVEFKTMNAKLLMDPKRQIFLDQNMLAVIDELMQALNFNSETVPQKSSLEEPDFYKTKIKLCILLHAFRIRAVTIDRVMSYLNASSGGPALFKSSFPPGSEVQLVESGGGLVQPGNSLRLSCAASGFTFSKFGMSWVRQAPGKGLEWVSSISGSGRDTLYAESVKGRFTISRDNAKTTLYLQMNSLRPEDTAVYYCTIGGSLSVSSQGTLVTVSSGGGGSGGGGSGGGGSGGGGSGGGGSGGGGSQSVLTQPPSVSGAPGQRVTISCSGSRSNIGDETVKWYQQLPGTAPKLLIYYNDQRPSGVPDRFSGSKSGTSASLAITGLQAEDEADYYCQSYDRYTHPALLFGTGTKVTVLGGGGSGGGGSGGGGSQVQLVESGGGVVQPGRSLRLSCAASGFTFSSYGMHWVRQAPGKGLEWVAFIRYEGSNKYYAESVKGRFTISRDNSKNTLYLQMNSLRAEDTAVYYCKTHGSHDNWGQGTMVTVSS

SEQ ID NO: 535 - protein, 891 aa, Artificial Sequence
  source: /note="Description of Artificial Sequence: Synthetic polypeptide"
IWELKKDVYVVELDWYPDAPGEMVVLTCDTPEEDGITWTLDQSSEVLGSGKTLTIQVKEFGDAGQYTCHKGGEVLSHSLLLLHKKEDGIWSTDILKDQKEPKNKTFLRCEAKNYSGRFTCWWLTTISTDLTFSVKSSRGSSDPQGVTCGAATLSAERVRGDNKEYEYSVECQEDSACPAAEESLPIEVMVDAVHKLKYENYTSSFFIRDIIKPDPPKNLQLKPLKNSRQVEVSWEYPDTWSTPHSYFSLTFCVQVQGKSKREKKDRVFTDKTSATVICRKNASISVRAQDRYYSSSWSEWASVPCSGGGGSGGGGSGGGGSRVIPVSGPARCLSQSRNLLKTTDDMVKTAREKLKHYSCTAEDIDHEDITRDQTSTLKTCLPLELHKNESCLATRETSSTTRGSCLPPQKTSLMMTLCLGSIYEDLKMYQTEFQAINAALQNHNHQQIILDKGMLVAIDELMQSLNHNGETLRQKPPVGEADPYRVKMKLCILLHAFSTRVVTINRVMGYLSSASGGPALFKSSFPPGSEVQLVESGGGLVQPGNSLRLSCAASGFTFSKFGMSWVRQAPGKGLEWVSSISGSGRDTLYAESVKGRFTISRDNAKTTLYLQMNSLRPEDTAVYYCTIGGSLSVSSQGTLVTVSSGGGGSGGGGSGGGGSGGGGSGGGGSGGGGSQSVLTQPPSVSGAPGQRVTISCSGSRSNIGSNTVKWYQQLPGTAPKLLIYYNDQRPSGVPDRFSGSKSGTSASLAITGLQAEDEADYYCQSYDRYTHPALLFGTGTKVTVLGQPKAAPSVTLFPPSSEELQANKATLVCLISDFYPGAVTVAWKADSSPVKAGVETTTPSKQSNNKYAASSYLSLTPEQWKSHRSYSCQVTHEGSTVEKTVAPTECS

SEQ ID NO: 536 - protein, 895 aa, Artificial Sequence
  source: /note="Description of Artificial Sequence: Synthetic polypeptide"
IWELKKDVYVVELDWYPDAPGEMVVLTCDTPEEDGITWTLDQSSEVLGSGKTLTIQVKEFGDAGQYTCHKGGEVLSHSLLLLHKKEDGIWSTDILKDQKEPKNKTFLRCEAKNYSGRFTCWWLTTISTDLTFSVKSSRGSSDPQGVTCGAATLSAERVRGDNKEYEYSVECQEDSACPAAEESLPIEVMVDAVHKLKYENYTSSFFIRDIIKPDPPKNLQLKPLKNSRQVEVSWEYPDTWSTPHSYFSLTFCVQVQGKSKREKKDRVFTDKTSATVICRKNASISVRAQDRYYSSSWSEWASVPCSGGGGSGGGGSGGGGSRNLPVATPDPGMFPCLHHSQNLLRAVSNMLQKARQTLEFYPCTSEEIDHEDITKDKTSTVEACLPLELTKNESCLNSRETSFITNGSCLASRKTSFMMALCLSSIYEDLKMYQVEFKTMNAKLLMDPKRQIFLDQNMLAVIDELMQALNFNSETVPQKSSLEEPDFYKTKIKLCILLHAFRIRAVTIDRVMSYLNASSGGPALFKSSFPPGSEVQLVESGGGLVQPGNSLRLSCAASGFTFSKFGMSWVRQAPGKGLEWVSSISGSGRDTLYAESVKGRFTISRDNAKTTLYLQMNSLRPEDTAVYYCTIGGSLSVSSQGTLVTVSSGGGGSGGGGSGGGGSGGGGSGGGGSGGGGSQSVLTQPPSVSGAPGQRVTISCSGSRSNIGSNTVKWYQQLPGTAPKLLIYYNDQRPSGVPDRFSGSKSGTSASLAITGLQAEDEADYYCQSYDRYTHPALLFGTGTKVTVLGQPKAAPSVTLFPPSSEELQANKATLVCLISDFYPGAVTVAWKADSSPVKAGVETTTPSKQSNNKYAASSYLSLTPEQWKSHRSYSCQVTHEGSTVEKTVAPTECS

SEQ ID NO: 537 - protein, 891 aa, Artificial Sequence
  source: /note="Description of Artificial Sequence: Synthetic polypeptide"
IWELKKDVYVVELDWYPDAPGEMVVLTCDTPEEDGITWTLDQSSEVLGSGKTLTIQVKEFGDAGQYTCHKGGEVLSHSLLLLHKKEDGIWSTDILKDQKEPKNKTFLRCEAKNYSGRFTCWWLTTISTDLTFSVKSSRGSSDPQGVTCGAATLSAERVRGDNKEYEYSVECQEDSACPAAEESLPIEVMVDAVHKLKYENYTSSFFIRDIIKPDPPKNLQLKPLKNSRQVEVSWEYPDTWSTPHSYFSLTFCVQVQGKSKREKKDRVFTDKTSATVICRKNASISVRAQDRYYSSSWSEWASVPCSGGGGSGGGGSGGGGSRVIPVSGPARCLSQSRNLLKTTDDMVKTAREKLKHYSCTAEDIDHEDITRDQTSTLKTCLPLELHKNESCLATRETSSTTRGSCLPPQKTSLMMTLCLGSIYEDLKMYQTEFQAINAALQNHNHQQIILDKGMLVAIDELMQSLNHNGETLRQKPPVGEADPYRVKMKLCILLHAFSTRVVTINRVMGYLSSASGGPALFKSSFPPGSEVQLVESGGGLVQPGNSLRLSCAASGFTFSKFGMSWVRQAPGKGLEWVSSISGSGRDTLYAESVKGRFTISRDNAKTTLYLQMNSLRPEDTAVYYCTIGGSLSVSSQGTLVTVSSGGGGSGGGGSGGGGSGGGGSGGGGSGGGGSQSVLTQPPSVSGAPGQRVTISCSGSRSNIGDETVKWYQQLPGTAPKLLIYYNDQRPSGVPDRFSGSKSGTSASLAITGLQAEDEADYYCQSYDRYTHPALLFGTGTKVTVLGQPKAAPSVTLFPPSSEELQANKATLVCLISDFYPGAVTVAWKADSSPVKAGVETTTPSKQSNNKYAASSYLSLTPEQWKSHRSYSCQVTHEGSTVEKTVAPTECS

SEQ ID NO: 538 - protein, 895 aa, Artificial Sequence
  source: /note="Description of Artificial Sequence: Synthetic polypeptide"
IWELKKDVYVVELDWYPDAPGEMVVLTCDTPEEDGITWTLDQSSEVLGSGKTLTIQVKEFGDAGQYTCHKGGEVLSHSLLLLHKKEDGIWSTDILKDQKEPKNKTFLRCEAKNYSGRFTCWWLTTISTDLTFSVKSSRGSSDPQGVTCGAATLSAERVRGDNKEYEYSVECQEDSACPAAEESLPIEVMVDAVHKLKYENYTSSFFIRDIIKPDPPKNLQLKPLKNSRQVEVSWEYPDTWSTPHSYFSLTFCVQVQGKSKREKKDRVFTDKTSATVICRKNASISVRAQDRYYSSSWSEWASVPCSGGGGSGGGGSGGGGSRNLPVATPDPGMFPCLHHSQNLLRAVSNMLQKARQTLEFYPCTSEEIDHEDITKDKTSTVEACLPLELTKNESCLNSRETSFITNGSCLASRKTSFMMALCLSSIYEDLKMYQVEFKTMNAKLLMDPKRQIFLDQNMLAVIDELMQALNFNSETVPQKSSLEEPDFYKTKIKLCILLHAFRIRAVTIDRVMSYLNASSGGPALFKSSFPPGSEVQLVESGGGLVQPGNSLRLSCAASGFTFSKFGMSWVRQAPGKGLEWVSSISGSGRDTLYAESVKGRFTISRDNAKTTLYLQMNSLRPEDTAVYYCTIGGSLSVSSQGTLVTVSSGGGGSGGGGSGGGGSGGGGSGGGGSGGGGSQSVLTQPPSVSGAPGQRVTISCSGSRSNIGDETVKWYQQLPGTAPKLLIYYNDQRPSGVPDRFSGSKSGTSASLAITGLQAEDEADYYCQSYDRYTHPALLFGTGTKVTVLGQPKAAPSVTLFPPSSEELQANKATLVCLISDFYPGAVTVAWKADSSPVKAGVETTTPSKQSNNKYAASSYLSLTPEQWKSHRSYSCQVTHEGSTVEKTVAPTECS

SEQ ID NO: 539 - protein, 427 aa, Artificial Sequence
  source: /note="Description of Artificial Sequence: Synthetic polypeptide"
EVQLVESGGGLVQPGNSLRLSCAASGFTFSKFGMSWVRQAPGKGLEWVSSISGSGRDTLYAESVKGRFTISRDNAKTTLYLQMNSLRPEDTAVYYCTIGGSLSVSSQGTLVTVSSSGGPGPAGLYAQPGSCDLPHTYNLRNKRALKVLAQMRRLTPLSCLKDRKDFGFPLEKVDAQQIQKAQSIPVLRDLTQQILNLFASKDSSAAWNATLLDSFCNDLHQQLNDLQGCLMQQVGVQESPLTQEDSLLAVRIYFHRITVFLREKKHSPCAWEVVRAEVWRALSSSANVLGRLREEKASGGPGPAGLYAQPGSEVQLVESGGGLVQPGNSLRLSCAASGFTFSKFGMSWVRQAPGKGLEWVSSISGSGRDTLYAESVKGRFTISRDNAKTTLYLQMNSLRPEDTAVYYCTIGGSLSVSSQGTLVTVSS

SEQ ID NO: 540 - protein, 427 aa, Artificial Sequence
  source: /note="Description of Artificial Sequence: Synthetic polypeptide"
EVQLVESGGGLVQPGNSLRLSCAASGFTFSKFGMSWVRQAPGKGLEWVSSISGSGRDTLYAESVKGRFTISRDNAKTTLYLQMNSLRPEDTAVYYCTIGGSLSVSSQGTLVTVSSSGGPALFKSSFPPGSCDLPHTYNLRNKRALKVLAQMRRLTPLSCLKDRKDFGFPLEKVDAQQIQKAQSIPVLRDLTQQILNLFASKDSSAAWNATLLDSFCNDLHQQLNDLQGCLMQQVGVQESPLTQEDSLLAVRIYFHRITVFLREKKHSPCAWEVVRAEVWRALSSSANVLGRLREEKASGGPALFKSSFPPGSEVQLVESGGGLVQPGNSLRLSCAASGFTFSKFGMSWVRQAPGKGLEWVSSISGSGRDTLYAESVKGRFTISRDNAKTTLYLQMNSLRPEDTAVYYCTIGGSLSVSSQGTLVTVSS

SEQ ID NO: 541 - protein, 426 aa, Artificial Sequence
  source: /note="Description of Artificial Sequence: Synthetic polypeptide"
EVQLVESGGGLVQPGNSLRLSCAASGFTFSKFGMSWVRQAPGKGLEWVSSISGSGRDTLYAESVKGRFTISRDNAKTTLYLQMNSLRPEDTAVYYCTIGGSLSVSSQGTLVTVSSSGGPGPAGLYAQPGSCNLSQTHSLNNRRTLMLMAQMRRISPFSCLKDRHDFEFPQEEFDGNQFQKAQAISVLHEMMQQTFNLFSTKNSSAAWDETLLEKFYIELFQQMNDLEACVIQEVGVEETPLMNEDSILAVKKYFQRITLYLMEKKYSPCAWEVVRAEIMRSLSFSTNLQKRLRRKDSGGPGPAGLYAQPGSEVQLVESGGGLVQPGNSLRLSCAASGFTFSKFGMSWVRQAPGKGLEWVSSISGSGRDTLYAESVKGRFTISRDNAKTTLYLQMNSLRPEDTAVYYCTIGGSLSVSSQGTLVTVSS

SEQ ID NO: 542 - protein, 426 aa, Artificial Sequence
  source: /note="Description of Artificial Sequence: Synthetic polypeptide"
EVQLVESGGGLVQPGNSLRLSCAASGFTFSKFGMSWVRQAPGKGLEWVSSISGSGRDTLYAESVKGRFTISRDNAKTTLYLQMNSLRPEDTAVYYCTIGGSLSVSSQGTLVTVSSSGGPALFKSSFPPGSCNLSQTHSLNNRRTLMLMAQMRRISPFSCLKDRHDFEFPQEEFDGNQFQKAQAISVLHEMMQQTFNLFSTKNSSAAWDETLLEKFYIELFQQMNDLEACVIQEVGVEETPLMNEDSILAVKKYFQRITLYLMEKKYSPCAWEVVRAEIMRSLSFSTNLQKRLRRKDSGGPALFKSSFPPGSEVQLVESGGGLVQPGNSLRLSCAASGFTFSKFGMSWVRQAPGKGLEWVSSISGSGRDTLYAESVKGRFTISRDNAKTTLYLQMNSLRPEDTAVYYCTIGGSLSVSSQGTLVTVSS

SEQ ID NO: 543 - protein, 173 aa, Artificial Sequence
  source: /note="Description of Artificial Sequence: Synthetic polypeptide"
CDLPHTYNLRNKRALKVLAQMRRLTPLSCLKDRKDFGFPLEKVDAQQIQKAQSIPVLRDLTQQILNLFASKDSSAAWNATLLDSFCNDLHQQLNDLQGCLMQQVGVQESPLTQEDSLLAVRIYFHRITVFLREKKHSPCAWEVVRAEVWRALSSSANVLGRLREEKAHHHHHH

SEQ ID NO: 544 - protein, 172 aa, Artificial Sequence
  source: /note="Description of Artificial Sequence: Synthetic polypeptide"
CNLSQTHSLNNRRTLMLMAQMRRISPFSCLKDRHDFEFPQEEFDGNQFQKAQAISVLHEMMQQTFNLFSTKNSSAAWDETLLEKFYIELFQQMNDLEACVIQEVGVEETPLMNEDSILAVKKYFQRITLYLMEKKYSPCAWEVVRAEIMRSLSFSTNLQKRLRRKDHHHHHH

SEQ ID NO: 545 - protein, 425 aa, Artificial Sequence
  source: /note="Description of Artificial Sequence: Synthetic polypeptide"
EVQLVESGGGLVQPGNSLRLSCAASGFTFSKFGMSWVRQAPGKGLEWVSSISGSGRDTLYAESVKGRFTISRDNAKTTLYLQMNSLRPEDTAVYYCTIGGSLSVSSQGTLVTVSSSGGPGPAGLYAQPGSCDLPQTHSLGSRRTLMLLAQMRRISLFSCLKDRHDFGFPQEEFGNQFQKAETIPVLHEMIQQIFNLFSTKDSSAAWDETLLDKFYTELYQQLNDLEACVIQGVGVEETPLMKEDSILAVRKYFQRITLYLKEKKYSPCAWEVVRAEIMRSFSLSTNLQESLRSKESGGPGPAGLYAQPGSEVQLVESGGGLVQPGNSLRLSCAASGFTFSKFGMSWVRQAPGKGLEWVSSISGSGRDTLYAESVKGRFTISRDNAKTTLYLQMNSLRPEDTAVYYCTIGGSLSVSSQGTLVTVSS

SEQ ID NO: 546 - protein, 426 aa, Artificial Sequence
  source: /note="Description of Artificial Sequence: Synthetic polypeptide"
EVQLVESGGGLVQPGNSLRLSCAASGFTFSKFGMSWVRQAPGKGLEWVSSISGSGRDTLYAESVKGRFTISRDNAKTTLYLQMNSLRPEDTAVYYCTIGGSLSVSSQGTLVTVSSSGGPGPAGLYAQPGSCNLSQTHSLNNRRTLMLMAQMRRISPFSCLKDRHDFEFPQEEFDGNQFQKAQAISVLHEMMQQTFNLFSTKDSSAAWDETLLEKFYIELFQQMNDLEACVIQEVGVEETPLMNEDSILAVKKYFQRITLYLMEKKYSPCAWEVVRAEIMRSLSFSTNLQKRLRRKDSGGPGPAGLYAQPGSEVQLVESGGGLVQPGNSLRLSCAASGFTFSKFGMSWVRQAPGKGLEWVSSISGSGRDTLYAESVKGRFTISRDNAKTTLYLQMNSLRPEDTAVYYCTIGGSLSVSSQGTLVTVSS

SEQ ID NO: 547 - protein, 426 aa, Artificial Sequence
  source: /note="Description of Artificial Sequence: Synthetic polypeptide"
EVQLVESGGGLVQPGNSLRLSCAASGFTFSKFGMSWVRQAPGKGLEWVSSISGSGRDTLYAESVKGRFTISRDNAKTTLYLQMNSLRPEDTAVYYCTIGGSLSVSSQGTLVTVSSSGGPGPAGLYAQPGSCDLPQTHSLNNRRTLMLMAQMRRISPFSCLKDRHDFEFPQEEFDGNQFQKAQAISVLHEMMQQTFNLFSTKDSSAAWDETLLEKFYIELFQQMNDLEACVIQEVGVEETPLMNEDSILAVKKYFQRITLYLMEKKYSPCAWEVVRAEIMRSLSFSTNLQKRLRRKDSGGPGPAGLYAQPGSEVQLVESGGGLVQPGNSLRLSCAASGFTFSKFGMSWVRQAPGKGLEWVSSISGSGRDTLYAESVKGRFTISRDNAKTTLYLQMNSLRPEDTAVYYCTIGGSLSVSSQGTLVTVSS

SEQ ID NO: 548 - protein, 171 aa, Artificial Sequence
  source: /note="Description of Artificial Sequence: Synthetic polypeptide"
CDLPQTHSLGSRRTLMLLAQMRRISLFSCLKDRHDFGFPQEEFGNQFQKAETIPVLHEMIQQIFNLFSTKDSSAAWDETLLDKFYTELYQQLNDLEACVIQGVGVEETPLMKEDSILAVRKYFQRITLYLKEKKYSPCAWEVVRAEIMRSFSLSTNLQESLRSKEHHHHHH

SEQ ID NO: 549 - protein, 172 aa, Artificial Sequence
  source: /note="Description of Artificial Sequence: Synthetic polypeptide"
CNLSQTHSLNNRRTLMLMAQMRRISPFSCLKDRHDFEFPQEEFDGNQFQKAQAISVLHEMMQQTFNLFSTKDSSAAWDETLLEKFYIELFQQMNDLEACVIQEVGVEETPLMNEDSILAVKKYFQRITLYLMEKKYSPCAWEVVRAEIMRSLSFSTNLQKRLRRKDHHHHHH

SEQ ID NO: 550 - protein, 172 aa, Artificial Sequence
  source: /note="Description of Artificial Sequence: Synthetic polypeptide"
CDLPQTHSLNNRRTLMLMAQMRRISPFSCLKDRHDFEFPQEEFDGNQFQKAQAISVLHEMMQQTFNLFSTKDSSAAWDETLLEKFYIELFQQMNDLEACVIQEVGVEETPLMNEDSILAVKKYFQRITLYLMEKKYSPCAWEVVRAEIMRSLSFSTNLQKRLRRKDHHHHHH

SEQ ID NO: 551 - protein, 1370 aa, Artificial Sequence
  source: /note="Description of Artificial Sequence: Synthetic polypeptide"
EAHKSEIAHRYNDLGEQHFKGLVLIAFSQYLQKCSYDEHAKLVQEVTDFAKTCVADESAANCDKSLHTLFGDKLCAIPNLRENYGELADCCTKQEPERNECFLQHKDDNPSLPPFERPEAEAMCTSFKENPTTFMGHYLHEVARRHPYFYAPELLYYAEQYNEILTQCCAEADKESCLTPKLDGVKEKALVSSVRQRMKCSSMQKFGERAFKAWAVARLSQTFPNADFAEITKLATDLTKVNKECCHGDLLECADDRAELAKYMCENQATISSKLQTCCDKPLLKKAHCLSEVEHDTMPADLPAIAADFVEDQEVCKNYAEAKDVFLGTFLYEYSRRHPDYSVSLLLRLAKKYEATLEKCCAEANPPACYGTVLAEFQPLVEEPKNLVKTNCDLYEKLGEYGFQNAILVRYTQKAPQVSTPTLVEAARNLGRVGTKCCTLPEDQRLPCVEDYLSAILNRVCLLHEKTPVSEHVTKCCSGSLVERRPCFSALTVDETYVPKEFKAETFTFHSDICTLPEKEKQIKKQTALAELVKHKPKATAEQLKTVMDDFAQFLDTCCKAADKDTCFSTEGPNLVTRCKDALASGGPALFKSSFPPGSCDLPQTHNLRNKRALTLLVQMRRLSPLSCLKDRKDFGFPQEKVDAQQIKKAQAIPVLSELTQQILNIFTSKDSSAAWNTTLLDSFCNDLHQQLNDLQGCLMQQVGVQEFPLTQEDALLAVRKYFHRITVYLREKKHSPCAWEVVRAEVWRALSSSANVLGRLREEKSGGPALFKSSFPPGSEAHKSEIAHRYNDLGEQHFKGLVLIAFSQYLQKCSYDEHAKLVQEVTDFAKTCVADESAANCDKSLHTLFGDKLCAIPNLRENYGELADCCTKQEPERNECFLQHKDDNPSLPPFERPEAEAMCTSFKENPTTFMGHYLHEVARRHPYFYAPELLYYAEQYNEILTQCCAEADKESCLTPKLDGVKEKALVSSVRQRMKCSSMQKFGERAFKAWAVARLSQTFPNADFAEITKLATDLTKVNKECCHGDLLECADDRAELAKYMCENQATISSKLQTCCDKPLLKKAHCLSEVEHDTMPADLPAIAADFVEDQEVCKNYAEAKDVFLGTFLYEYSRRHPDYSVSLLLRLAKKYEATLEKCCAEANPPACYGTVLAEFQPLVEEPKNLVKTNCDLYEKLGEYGFQNAILVRYTQKAPQVSTPTLVEAARNLGRVGTKCCTLPEDQRLPCVEDYLSAILNRVCLLHEKTPVSEHVTKCCSGSLVERRPCFSALTVDETYVPKEFKAETFTFHSDICTLPEKEKQIKKQTALAELVKHKPKATAEQLKTVMDDFAQFLDTCCKAADKDTCFSTEGPNLVTRCKDALAHHHHHH

SEQ ID NO: 552 - protein, 1371 aa, Artificial Sequence
  source: /note="Description of Artificial Sequence: Synthetic polypeptide"
EAHKSEIAHRYNDLGEQHFKGLVLIAFSQYLQKCSYDEHAKLVQEVTDFAKTCVADESAANCDKSLHTLFGDKLCAIPNLRENYGELADCCTKQEPERNECFLQHKDDNPSLPPFERPEAEAMCTSFKENPTTFMGHYLHEVARRHPYFYAPELLYYAEQYNEILTQCCAEADKESCLTPKLDGVKEKALVSSVRQRMKCSSMQKFGERAFKAWAVARLSQTFPNADFAEITKLATDLTKVNKECCHGDLLECADDRAELAKYMCENQATISSKLQTCCDKPLLKKAHCLSEVEHDTMPADLPAIAADFVEDQEVCKNYAEAKDVFLGTFLYEYSRRHPDYSVSLLLRLAKKYEATLEKCCAEANPPACYGTVLAEFQPLVEEPKNLVKTNCDLYEKLGEYGFQNAILVRYTQKAPQVSTPTLVEAARNLGRVGTKCCTLPEDQRLPCVEDYLSAILNRVCLLHEKTPVSEHVTKCCSGSLVERRPCFSALTVDETYVPKEFKAETFTFHSDICTLPEKEKQIKKQTALAELVKHKPKATAEQLKTVMDDFAQFLDTCCKAADKDTCFSTEGPNLVTRCKDALASGGPALFKSSFPPGSCDLPHTYNLRNKRALKVLAQMRRLTPLSCLKDRKDFGFPLEKVDAQQIQKAQSIPVLRDLTQQILNLFASKDSSAAWNATLLDSFCNDLHQQLNDLQGCLMQQVGVQESPLTQEDSLLAVRIYFHRITVFLREKKHSPCAWEVVRAEVWRALSSSANVLGRLREEKASGGPALFKSSFPPGSEAHKSEIAHRYNDLGEQHFKGLVLIAFSQYLQKCSYDEHAKLVQEVTDFAKTCVADESAANCDKSLHTLFGDKLCAIPNLRENYGELADCCTKQEPERNECFLQHKDDNPSLPPFERPEAEAMCTSFKENPTTFMGHYLHEVARRHPYFYAPELLYYAEQYNEILTQCCAEADKESCLTPKLDGVKEKALVSSVRQRMKCSSMQKFGERAFKAWAVARLSQTFPNADFAEITKLATDLTKVNKECCHGDLLECADDRAELAKYMCENQATISSKLQTCCDKPLLKKAHCLSEVEHDTMPADLPAIAADFVEDQEVCKNYAEAKDVFLGTFLYEYSRRHPDYSVSLLLRLAKKYEATLEKCCAEANPPACYGTVLAEFQPLVEEPKNLVKTNCDLYEKLGEYGFQNAILVRYTQKAPQVSTPTLVEAARNLGRVGTKCCTLPEDQRLPCVEDYLSAILNRVCLLHEKTPVSEHVTKCCSGSLVERRPCFSALTVDETYVPKEFKAETFTFHSDICTLPEKEKQIKKQTALAELVKHKPKATAEQLKTVMDDFAQFLDTCCKAADKDTCFSTEGPNLVTRCKDALAHHHHHH

SEQ ID NO: 553 - protein, 901 aa, Artificial Sequence
  source: /note="Description of Artificial Sequence: Synthetic polypeptide"
EVQLVESGGGLVQPGNSLRLSCAASGFTFSKFGMSWVRQAPGKGLEWVSSISGSGRDTLYAESVKGRFTISRDNAKTTLYLQMNSLRPEDTAVYYCTIGGSLSVSSQGTLVTVSSSGGPALFKSSFPPGSCDLPQTHNLRNKRALTLLVQMRRLSPLSCLKDRKDFGFPQEKVDAQQIKKAQAIPVLSELTQQILNIFTSKDSSAAWNTTLLDSFCNDLHQQLNDLQGCLMQQVGVQEFPLTQEDALLAVRKYFHRITVYLREKKHSPCAWEVVRAEVWRALSSSANVLGRLREEKSGGPALFKSSFPPGSEAHKSEIAHRYNDLGEQHFKGLVLIAFSQYLQKCSYDEHAKLVQEVTDFAKTCVADESAANCDKSLHTLFGDKLCAIPNLRENYGELADCCTKQEPERNECFLQHKDDNPSLPPFERPEAEAMCTSFKENPTTFMGHYLHEVARRHPYFYAPELLYYAEQYNEILTQCCAEADKESCLTPKLDGVKEKALVSSVRQRMKCSSMQKFGERAFKAWAVARLSQTFPNADFAEITKLATDLTKVNKECCHGDLLECADDRAELAKYMCENQATISSKLQTCCDKPLLKKAHCLSEVEHDTMPADLPAIAADFVEDQEVCKNYAEAKDVFLGTFLYEYSRRHPDYSVSLLLRLAKKYEATLEKCCAEANPPACYGTVLAEFQPLVEEPKNLVKTNCDLYEKLGEYGFQNAILVRYTQKAPQVSTPTLVEAARNLGRVGTKCCTLPEDQRLPCVEDYLSAILNRVCLLHEKTPVSEHVTKCCSGSLVERRPCFSALTVDETYVPKEFKAETFTFHSDICTLPEKEKQIKKQTALAELVKHKPKATAEQLKTVMDDFAQFLDTCCKAADKDTCFSTEGPNLVTRCKDALAHHHHHH

SEQ ID NO: 554 - protein, 902 aa, Artificial Sequence
  source: /note="Description of Artificial Sequence: Synthetic polypeptide"
EVQLVESGGGLVQPGNSLRLSCAASGFTFSKFGMSWVRQAPGKGLEWVSSISGSGRDTLYAESVKGRFTISRDNAKTTLYLQMNSLRPEDTAVYYCTIGGSLSVSSQGTLVTVSSSGGPALFKSSFPPGSCDLPHTYNLRNKRALKVLAQMRRLTPLSCLKDRKDFGFPLEKVDAQQIQKAQSIPVLRDLTQQILNLFASKDSSAAWNATLLDSFCNDLHQQLNDLQGCLMQQVGVQESPLTQEDSLLAVRIYFHRITVFLREKKHSPCAWEVVRAEVWRALSSSANVLGRLREEKASGGPALFKSSFPPGSEAHKSEIAHRYNDLGEQHFKGLVLIAFSQYLQKCSYDEHAKLVQEVTDFAKTCVADESAANCDKSLHTLFGDKLCAIPNLRENYGELADCCTKQEPERNECFLQHKDDNPSLPPFERPEAEAMCTSFKENPTTFMGHYLHEVARRHPYFYAPELLYYAEQYNEILTQCCAEADKESCLTPKLDGVKEKALVSSVRQRMKCSSMQKFGERAFKAWAVARLSQTFPNADFAEITKLATDLTKVNKECCHGDLLECADDRAELAKYMCENQATISSKLQTCCDKPLLKKAHCLSEVEHDTMPADLPAIAADFVEDQEVCKNYAEAKDVFLGTFLYEYSRRHPDYSVSLLLRLAKKYEATLEKCCAEANPPACYGTVLAEFQPLVEEPKNLVKTNCDLYEKLGEYGFQNAILVRYTQKAPQVSTPTLVEAARNLGRVGTKCCTLPEDQRLPCVEDYLSAILNRVCLLHEKTPVSEHVTKCCSGSLVERRPCFSALTVDETYVPKEFKAETFTFHSDICTLPEKEKQIKKQTALAELVKHKPKATAEQLKTVMDDFAQFLDTCCKAADKDTCFSTEGPNLVTRCKDALAHHHHHH

SEQ ID NO: 555 - protein, 901 aa, Artificial Sequence
  source: /note="Description of Artificial Sequence: Synthetic polypeptide"
EAHKSEIAHRYNDLGEQHFKGLVLIAFSQYLQKCSYDEHAKLVQEVTDFAKTCVADESAANCDKSLHTLFGDKLCAIPNLRENYGELADCCTKQEPERNECFLQHKDDNPSLPPFERPEAEAMCTSFKENPTTFMGHYLHEVARRHPYFYAPELLYYAEQYNEILTQCCAEADKESCLTPKLDGVKEKALVSSVRQRMKCSSMQKFGERAFKAWAVARLSQTFPNADFAEITKLATDLTKVNKECCHGDLLECADDRAELAKYMCENQATISSKLQTCCDKPLLKKAHCLSEVEHDTMPADLPAIAADFVEDQEVCKNYAEAKDVFLGTFLYEYSRRHPDYSVSLLLRLAKKYEATLEKCCAEANPPACYGTVLAEFQPLVEEPKNLVKTNCDLYEKLGEYGFQNAILVRYTQKAPQVSTPTLVEAARNLGRVGTKCCTLPEDQRLPCVEDYLSAILNRVCLLHEKTPVSEHVTKCCSGSLVERRPCFSALTVDETYVPKEFKAETFTFHSDICTLPEKEKQIKKQTALAELVKHKPKATAEQLKTVMDDFAQFLDTCCKAADKDTCFSTEGPNLVTRCKDALASGGPALFKSSFPPGSCDLPQTHNLRNKRALTLLVQMRRLSPLSCLKDRKDFGFPQEKVDAQQIKKAQAIPVLSELTQQILNIFTSKDSSAAWNTTLLDSFCNDLHQQLNDLQGCLMQQVGVQEFPLTQEDALLAVRKYFHRITVYLREKKHSPCAWEVVRAEVWRALSSSANVLGRLREEKSGGPALFKSSFPPGSEVQLVESGGGLVQPGNSLRLSCAASGFTFSKFGMSWVRQAPGKGLEWVSSISGSGRDTLYAESVKGRFTISRDNAKTTLYLQMNSLRPEDTAVYYCTIGGSLSVSSQGTLVTVSSHHHHHH

SEQ ID NO: 556 - protein, 902 aa, Artificial Sequence
  source: /note="Description of Artificial Sequence: Synthetic polypeptide"
EAHKSEIAHRYNDLGEQHFKGLVLIAFSQYLQKCSYDEHAKLVQEVTDFAKTCVADESAANCDKSLHTLFGDKLCAIPNLRENYGELADCCTKQEPERNECFLQHKDDNPSLPPFERPEAEAMCTSFKENPTTFMGHYLHEVARRHPYFYAPELLYYAEQYNEILTQCCAEADKESCLTPKLDGVKEKALVSSVRQRMKCSSMQKFGERAFKAWAVARLSQTFPNADFAEITKLATDLTKVNKECCHGDLLECADDRAELAKYMCENQATISSKLQTCCDKPLLKKAHCLSEVEHDTMPADLPAIAADFVEDQEVCKNYAEAKDVFLGTFLYEYSRRHPDYSVSLLLRLAKKYEATLEKCCAEANPPACYGTVLAEFQPLVEEPKNLVKTNCDLYEKLGEYGFQNAILVRYTQKAPQVSTPTLVEAARNLGRVGTKCCTLPEDQRLPCVEDYLSAILNRVCLLHEKTPVSEHVTKCCSGSLVERRPCFSALTVDETYVPKEFKAETFTFHSDICTLPEKEKQIKKQTALAELVKHKPKATAEQLKTVMDDFAQFLDTCCKAADKDTCFSTEGPNLVTRCKDALASGGPALFKSSFPPGSCDLPHTYNLRNKRALKVLAQMRRLTPLSCLKDRKDFGFPLEKVDAQQIQKAQSIPVLRDLTQQILNLFASKDSSAAWNATLLDSFCNDLHQQLNDLQGCLMQQVGVQESPLTQEDSLLAVRIYFHRITVFLREKKHSPCAWEVVRAEVWRALSSSANVLGRLREEKASGGPALFKSSFPPGSEVQLVESGGGLVQPGNSLRLSCAASGFTFSKFGMSWVRQAPGKGLEWVSSISGSGRDTLYAESVKGRFTISRDNAKTTLYLQMNSLRPEDTAVYYCTIGGSLSVSSQGTLVTVSSHHHHHH

SEQ ID NO: 557 - protein, 1365 aa, Artificial Sequence
  source: /note="Description of Artificial Sequence: Synthetic polypeptide"
DAHKSEVAHRFKDLGEENFKALVLIAFAQYLQQCPFEDHVKLVNEVTEFAKTCVADESAENCDKSLHTLFGDKLCTVATLRETYGEMADCCAKQEPERNECFLQHKDDNPNLPRLVRPEVDVMCTAFHDNEETFLKKYLYEIARRHPYFYAPELLFFAKRYKAAFTECCQAADKAACLLPKLDELRDEGKASSAKQRLKCASLQKFGERAFKAWAVARLSQRFPKAEFAEVSKLVTDLTKVHTECCHGDLLECADDRADLAKYICENQDSISSKLKECCEKPLLEKSHCIAEVENDEMPADLPSLAADFVESKDVCKNYAEAKDVFLGMFLYEYARRHPDYSVVLLLRLAKTYETTLEKCCAAADPHECYAKVFDEFKPLVEEPQNLIKQNCELFEQLGEYKFQNALLVRYTKKVPQVSTPTLVEVSRNLGKVGSKCCKHPEAKRMPCAEDYLSVVLNQLCVLHEKTPVSDRVTKCCTESLVNRRPCFSALEVDETYVPKEFNAETFTFHADICTLSEKERQIKKQTALVELVKHKPKATKEQLKAVMDDFAAFVEKCCKADDKETCFAEEGKKLVAASQAALGLSGGPALFKSSFPPGSCDLPQTHSLGSRRTLMLLAQMRRISLFSCLKDRHDFGFPQEEFGNQFQKAETIPVLHEMIQQIFNLFSTKDSSAAWDETLLDKFYTELYQQLNDLEACVIQGVGVTETPLMKEDSILAVRKYFQRITLYLKEKKYSPCAWEVVRAEIMRSFSLSTNLQESLRSKESGGPALFKSSFPPGSDAHKSEVAHRFKDLGEENFKALVLIAFAQYLQQCPFEDHVKLVNEVTEFAKTCVADESAENCDKSLHTLFGDKLCTVATLRETYGEMADCCAKQEPERNECFLQHKDDNPNLPRLVRPEVDVMCTAFHDNEETFLKKYLYEIARRHPYFYAPELLFFAKRYKAAFTECCQAADKAACLLPKLDELRDEGKASSAKQRLKCASLQKFGERAFKAWAVARLSQRFPKAEFAEVSKLVTDLTKVHTECCHGDLLECADDRADLAKYICENQDSISSKLKECCEKPLLEKSHCIAEVENDEMPADLPSLAADFVESKDVCKNYAEAKDVFLGMFLYEYARRHPDYSVVLLLRLAKTYETTLEKCCAAADPHECYAKVFDEFKPLVEEPQNLIKQNCELFEQLGEYKFQNALLVRYTKKVPQVSTPTLVEVSRNLGKVGSKCCKHPEAKRMPCAEDYLSVVLNQLCVLHEKTPVSDRVTKCCTESLVNRRPCFSALEVDETYVPKEFNAETFTFHADICTLSEKERQIKKQTALVELVKHKPKATKEQLKAVMDDFAAFVEKCCKADDKETCFAEEGKKLVAASQAALGL

SEQ ID NO: 558 - protein, 1366 aa, Artificial Sequence
  source: /note="Description of Artificial Sequence: Synthetic polypeptide"
DAHKSEVAHRFKDLGEENFKALVLIAFAQYLQQCPFEDHVKLVNEVTEFAKTCVADESAENCDKSLHTLFGDKLCTVATLRETYGEMADCCAKQEPERNECFLQHKDDNPNLPRLVRPEVDVMCTAFHDNEETFLKKYLYEIARRHPYFYAPELLFFAKRYKAAFTECCQAADKAACLLPKLDELRDEGKASSAKQRLKCASLQKFGERAFKAWAVARLSQRFPKAEFAEVSKLVTDLTKVHTECCHGDLLECADDRADLAKYICENQDSISSKLKECCEKPLLEKSHCIAEVENDEMPADLPSLAADFVESKDVCKNYAEAKDVFLGMFLYEYARRHPDYSVVLLLRLAKTYETTLEKCCAAADPHECYAKVFDEFKPLVEEPQNLIKQNCELFEQLGEYKFQNALLVRYTKKVPQVSTPTLVEVSRNLGKVGSKCCKHPEAKRMPCAEDYLSVVLNQLCVLHEKTPVSDRVTKCCTESLVNRRPCFSALEVDETYVPKEFNAETFTFHADICTLSEKERQIKKQTALVELVKHKPKATKEQLKAVMDDFAAFVEKCCKADDKETCFAEEGKKLVAASQAALGLSGGPALFKSSFPPGSCNLSQTHSLNNRRTLMLMAQMRRISPFSCLKDRHDFEFPQEEFDGNQFQKAQAISVLHEMMQQTFNLFSTKNSSAAWDETLLEKFYIELFQQMNDLEACVIQEVGVEETPLMNEDSILAVKKYFQRITLYLMEKKYSPCAWEVVRAEIMRSLSFSTNLQKRLRRKDSGGPALFKSSFPPGSDAHKSEVAHRFKDLGEENFKALVLIAFAQYLQQCPFEDHVKLVNEVTEFAKTCVADESAENCDKSLHTLFGDKLCTVATLRETYGEMADCCAKQEPERNECFLQHKDDNPNLPRLVRPEVDVMCTAFHDNEETFLKKYLYEIARRHPYFYAPELLFFAKRYKAAFTECCQAADKAACLLPKLDELRDEGKASSAKQRLKCASLQKFGERAFKAWAVARLSQRFPKAEFAEVSKLVTDLTKVHTECCHGDLLECADDRADLAKYICENQDSISSKLKECCEKPLLEKSHCIAEVENDEMPADLPSLAADFVESKDVCKNYAEAKDVFLGMFLYEYARRHPDYSVVLLLRLAKTYETTLEKCCAAADPHECYAKVFDEFKPLVEEPQNLIKQNCELFEQLGEYKFQNALLVRYTKKVPQVSTPTLVEVSRNLGKVGSKCCKHPEAKRMPCAEDYLSVVLNQLCVLHEKTPVSDRVTKCCTESLVNRRPCFSALEVDETYVPKEFNAETFTFHADICTLSEKERQIKKQTALVELVKHKPKATKEQLKAVMDDFAAFVEKCCKADDKETCFAEEGKKLVAASQAALGL

SEQ ID NO: 559 - protein, 1366 aa, Artificial Sequence
  source: /note="Description of Artificial Sequence: Synthetic polypeptide"
DAHKSEVAHRFKDLGEENFKALVLIAFAQYLQQCPFEDHVKLVNEVTEFAKTCVADESAENCDKSLHTLFGDKLCTVATLRETYGEMADCCAKQEPERNECFLQHKDDNPNLPRLVRPEVDVMCTAFHDNEETFLKKYLYEIARRHPYFYAPELLFFAKRYKAAFTECCQAADKAACLLPKLDELRDEGKASSAKQRLKCASLQKFGERAFKAWAVARLSQRFPKAEFAEVSKLVTDLTKVHTECCHGDLLECADDRADLAKYICENQDSISSKLKECCEKPLLEKSHCIAEVENDEMPADLPSLAADFVESKDVCKNYAEAKDVFLGMFLYEYARRHPDYSVVLLLRLAKTYETTLEKCCAAADPHECYAKVFDEFKPLVEEPQNLIKQNCELFEQLGEYKFQNALLVRYTKKVPQVSTPTLVEVSRNLGKVGSKCCKHPEAKRMPCAEDYLSVVLNQLCVLHEKTPVSDRVTKCCTESLVNRRPCFSALEVDETYVPKEFNAETFTFHADICTLSEKERQIKKQTALVELVKHKPKATKEQLKAVMDDFAAFVEKCCKADDKETCFAEEGKKLVAASQAALGLSGGPALFKSSFPPGSCDLPQTHSLGNRRALILLAQMRRISPFSCLKDRHDFEFPQEEFDDKQFQKAQAISVLHEMIQQTFNLFSTKDSSAALDETLLDEFYIELDQQLNDLESCVMQEVGVIESPLMYEDSILAVRKYFQRITLYLTEKKYSSCAWEVVRAEIMRSFSLSINLQKRLKSKESGGPALFKSSFPPGSDAHKSEVAHRFKDLGEENFKALVLIAFAQYLQQCPFEDHVKLVNEVTEFAKTCVADESAENCDKSLHTLFGDKLCTVATLRETYGEMADCCAKQEPERNECFLQHKDDNPNLPRLVRPEVDVMCTAFHDNEETFLKKYLYEIARRHPYFYAPELLFFAKRYKAAFTECCQAADKAACLLPKLDELRDEGKASSAKQRLKCASLQKFGERAFKAWAVARLSQRFPKAEFAEVSKLVTDLTKVHTECCHGDLLECADDRADLAKYICENQDSISSKLKECCEKPLLEKSHCIAEVENDEMPADLPSLAADFVESKDVCKNYAEAKDVFLGMFLYEYARRHPDYSVVLLLRLAKTYETTLEKCCAAADPHECYAKVFDEFKPLVEEPQNLIKQNCELFEQLGEYKFQNALLVRYTKKVPQVSTPTLVEVSRNLGKVGSKCCKHPEAKRMPCAEDYLSVVLNQLCVLHEKTPVSDRVTKCCTESLVNRRPCFSALEVDETYVPKEFNAETFTFHADICTLSEKERQIKKQTALVELVKHKPKATKEQLKAVMDDFAAFVEKCCKADDKETCFAEEGKKLVAASQAALGL

SEQ ID NO: 560 - protein, 1366 aa, Artificial Sequence
  source: /note="Description of Artificial Sequence: Synthetic polypeptide"
DAHKSEVAHRFKDLGEENFKALVLIAFAQYLQQCPFEDHVKLVNEVTEFAKTCVADESAENCDKSLHTLFGDKLCTVATLRETYGEMADCCAKQEPERNECFLQHKDDNPNLPRLVRPEVDVMCTAFHDNEETFLKKYLYEIARRHPYFYAPELLFFAKRYKAAFTECCQAADKAACLLPKLDELRDEGKASSAKQRLKCASLQKFGERAFKAWAVARLSQRFPKAEFAEVSKLVTDLTKVHTECCHGDLLECADDRADLAKYICENQDSISSKLKECCEKPLLEKSHCIAEVENDEMPADLPSLAADFVESKDVCKNYAEAKDVFLGMFLYEYARRHPDYSVVLLLRLAKTYETTLEKCCAAADPHECYAKVFDEFKPLVEEPQNLIKQNCELFEQLGEYKFQNALLVRYTKKVPQVSTPTLVEVSRNLGKVGSKCCKHPEAKRMPCAEDYLSVVLNQLCVLHEKTPVSDRVTKCCTESLVNRRPCFSALEVDETYVPKEFNAETFTFHADICTLSEKERQIKKQTALVELVKHKPKATKEQLKAVMDDFAAFVEKCCKADDKETCFAEEGKKLVAASQAALGLSGGPALFKSSFPPGSCDLPQTHSLGNRRALILLAQMGRISHFSCLKDRYDFGFPQEVFDGNQFQKAQAISAFHEMIQQTFNLFSTKDSSAAWDETLLDKFYIELFQQLNDLEACVTQEVGVEEIALMNEDSILAVRKYFQRITLYLMGKKYSPCAWEVVRAEIMRSFSFSTNLQKGLRRKDSGGPALFKSSFPPGSDAHKSEVAHRFKDLGEENFKALVLIAFAQYLQQCPFEDHVKLVNEVTEFAKTCVADESAENCDKSLHTLFGDKLCTVATLRETYGEMADCCAKQEPERNECFLQHKDDNPNLPRLVRPEVDVMCTAFHDNEETFLKKYLYEIARRHPYFYAPELLFFAKRYKAAFTECCQAADKAACLLPKLDELRDEGKASSAKQRLKCASLQKFGERAFKAWAVARLSQRFPKAEFAEVSKLVTDLTKVHTECCHGDLLECADDRADLAKYICENQDSISSKLKECCEKPLLEKSHCIAEVENDEMPADLPSLAADFVESKDVCKNYAEAKDVFLGMFLYEYARRHPDYSVVLLLRLAKTYETTLEKCCAAADPHECYAKVFDEFKPLVEEPQNLIKQNCELFEQLGEYKFQNALLVRYTKKVPQVSTPTLVEVSRNLGKVGSKCCKHPEAKRMPCAEDYLSVVLNQLCVLHEKTPVSDRVTKCCTESLVNRRPCFSALEVDETYVPKEFNAETFTFHADICTLSEKERQIKKQTALVELVKHKPKATKEQLKAVMDDFAAFVEKCCKADDKETCFAEEGKKLVAASQAALGL

SEQ ID NO: 561 - protein, 426 aa, Artificial Sequence
  source: /note="Description of Artificial Sequence: Synthetic polypeptide"
EVQLVESGGGLVQPGNSLRLSCAASGFTFSKFGMSWVRQAPGKGLEWVSSISGSGRDTLYAESVKGRFTISRDNAKTTLYLQMNSLRPEDTAVYYCTIGGSLSVSSQGTLVTVSSSGGPALFKSSFPPGSCDLPQTHSLGNRRALILLAQMRRISPFSCLKDRHDFEFPQEEFDDKQFQKAQAISVLHEMIQQTFNLFSTKDSSAALDETLLDEFYIELDQQLNDLESCVMQEVGVIESPLMYEDSILAVRKYFQRITLYLTEKKYSSCAWEVVRAEIMRSFSLSINLQKRLKSKESGGPALFKSSFPPGSEVQLVESGGGLVQPGNSLRLSCAASGFTFSKFGMSWVRQAPGKGLEWVSSISGSGRDTLYAESVKGRFTISRDNAKTTLYLQMNSLRPEDTAVYYCTIGGSLSVSSQGTLVTVSS

SEQ ID NO: 562 - protein, 426 aa, Artificial Sequence
  source: /note="Description of Artificial Sequence: Synthetic polypeptide"
EVQLVESGGGLVQPGNSLRLSCAASGFTFSKFGMSWVRQAPGKGLEWVSSISGSGRDTLYAESVKGRFTISRDNAKTTLYLQMNSLRPEDTAVYYCTIGGSLSVSSQGTLVTVSSSGGPALFKSSFPPGSCDLPQTHSLGNRRALILLAQMGRISHFSCLKDRYDFGFPQEVFDGNQFQKAQAISAFHEMIQQTFNLFSTKDSSAAWDETLLDKFYIELFQQLNDLEACVTQEVGVEEIALMNEDSILAVRKYFQRITLYLMGKKYSPCAWEVVRAEIMRSFSFSTNLQKGLRRKDSGGPALFKSSFPPGSEVQLVESGGGLVQPGNSLRLSCAASGFTFSKFGMSWVRQAPGKGLEWVSSISGSGRDTLYAESVKGRFTISRDNAKTTLYLQMNSLRPEDTAVYYCTIGGSLSVSSQGTLVTVSS

SEQ ID NO: 563 - protein, 421 aa, Artificial Sequence
  source: /note="Description of Artificial Sequence: Synthetic polypeptide"
EVQLVESGGGLVQPGNSLRLSCAASGFTFSKFGMSWVRQAPGKGLEWVSSISGSGRDTLYAESVKGRFTISRDNAKTTLYLQMNSLRPEDTAVYYCTIGGSLSVSSQGTLVTVSSSGGPGPAGLYAQPGSINYKQLQLQERTNIRKCQELLEQLNGKINLTYRADFKIPMEMTEKMQKSYTAFAIQEMLQNVFLVFRNNFSSTGWNETIVVRLLDELHQQTVFLKTVLEEKQEERLTWEMSSTALHLKSYYWRVQRYLKLMKYNSYAWMVVRAEIFRNFLIIRRLTRNFQNSGGPGPAGLYAQPGSEVQLVESGGGLVQPGNSLRLSCAASGFTFSKFGMSWVRQAPGKGLEWVSSISGSGRDTLYAESVKGRFTISRDNAKTTLYLQMNSLRPEDTAVYYCTIGGSLSVSSQGTLVTVSS

SEQ ID NO: 564 - protein, 421 aa, Artificial Sequence
  source: /note="Description of Artificial Sequence: Synthetic polypeptide"
EVQLVESGGGLVQPGNSLRLSCAASGFTFSKFGMSWVRQAPGKGLEWVSSISGSGRDTLYAESVKGRFTISRDNAKTTLYLQMNSLRPEDTAVYYCTIGGSLSVSSQGTLVTVSSSGGPALFKSSFPPGSINYKQLQLQERTNIRKCQELLEQLNGKINLTYRADFKIPMEMTEKMQKSYTAFAIQEMLQNVFLVFRNNFSSTGWNETIVVRLLDELHQQTVFLKTVLEEKQEERLTWEMSSTALHLKSYYWRVQRYLKLMKYNSYAWMVVRAEIFRNFLIIRRLTRNFQNSGGPALFKSSFPPGSEVQLVESGGGLVQPGNSLRLSCAASGFTFSKFGMSWVRQAPGKGLEWVSSISGSGRDTLYAESVKGRFTISRDNAKTTLYLQMNSLRPEDTAVYYCTIGGSLSVSSQGTLVTVSS

SEQ ID NO: 565 - protein, 421 aa, Artificial Sequence
  source: /note="Description of Artificial Sequence: Synthetic polypeptide"
EVQLVESGGGLVQPGNSLRLSCAASGFTFSKFGMSWVRQAPGKGLEWVSSISGSGRDTLYAESVKGRFTISRDNAKTTLYLQMNSLRPEDTAVYYCTIGGSLSVSSQGTLVTVSSSGGPGPAGLYAQPGSINYKQLQLQERTNIRKSQELLEQLNGKINLTYRADFKIPMEMTEKMQKSYTAFAIQEMLQNVFLVFRNNFSSTGWNETIVVRLLDELHQQTVFLKTVLEEKQEERLTWEMSSTALHLKSYYWRVQRYLKLMKYNSYAWMVVRAEIFRNFLIIRRLTRNFQNSGGPGPAGLYAQPGSEVQLVESGGGLVQPGNSLRLSCAASGFTFSKFGMSWVRQAPGKGLEWVSSISGSGRDTLYAESVKGRFTISRDNAKTTLYLQMNSLRPEDTAVYYCTIGGSLSVSSQGTLVTVSS

SEQ ID NO: 566 - protein, 421 aa, Artificial Sequence
  source: /note="Description of Artificial Sequence: Synthetic polypeptide"
EVQLVESGGGLVQPGNSLRLSCAASGFTFSKFGMSWVRQAPGKGLEWVSSISGSGRDTLYAESVKGRFTISRDNAKTTLYLQMNSLRPEDTAVYYCTIGGSLSVSSQGTLVTVSSSGGPALFKSSFPPGSINYKQLQLQERTNIRKSQELLEQLNGKINLTYRADFKIPMEMTEKMQKSYTAFAIQEMLQNVFLVFRNNFSSTGWNETIVVRLLDELHQQTVFLKTVLEEKQEERLTWEMSSTALHLKSYYWRVQRYLKLMKYNSYAWMVVRAEIFRNFLIIRRLTRNFQNSGGPALFKSSFPPGSEVQLVESGGGLVQPGNSLRLSCAASGFTFSKFGMSWVRQAPGKGLEWVSSISGSGRDTLYAESVKGRFTISRDNAKTTLYLQMNSLRPEDTAVYYCTIGGSLSVSSQGTLVTVSS

SEQ ID NO: 567 - protein, 426 aa, Artificial Sequence
  source: /note="Description of Artificial Sequence: Synthetic polypeptide"
EVQLVESGGGLVQPGNSLRLSCAASGFTFSKFGMSWVRQAPGKGLEWVSSISGSGRDTLYAESVKGRFTISRDNAKTTLYLQMNSLRPEDTAVYYCTIGGSLSVSSQGTLVTVSSSGGPGPAGLYAQPGSMSYNLLGFLQRSSNFQCQKLLWQLNGRLEYCLKDRMNFDIPEEIKQLQQFQKEDAALTIYEMLQNIFAIFRQDSSSTGWNETIVENLLANVYHQINHLKTVLEEKLEKEDFTRGKLMSSLHLKRYYGRILHYLKAKEYSHCAWTIVRVEILRNFYFINRLTGYLRNSGGPGPAGLYAQPGSEVQLVESGGGLVQPGNSLRLSCAASGFTFSKFGMSWVRQAPGKGLEWVSSISGSGRDTLYAESVKGRFTISRDNAKTTLYLQMNSLRPEDTAVYYCTIGGSLSVSSQGTLVTVSS

SEQ ID NO: 568 - protein, 426 aa, Artificial Sequence
  source: /note="Description of Artificial Sequence: Synthetic polypeptide"
EVQLVESGGGLVQPGNSLRLSCAASGFTFSKFGMSWVRQAPGKGLEWVSSISGSGRDTLYAESVKGRFTISRDNAKTTLYLQMNSLRPEDTAVYYCTIGGSLSVSSQGTLVTVSSSGGPALFKSSFPPGSMSYNLLGFLQRSSNFQCQKLLWQLNGRLEYCLKDRMNFDIPEEIKQLQQFQKEDAALTIYEMLQNIFAIFRQDSSSTGWNETIVENLLANVYHQINHLKTVLEEKLEKEDFTRGKLMSSLHLKRYYGRILHYLKAKEYSHCAWTIVRVEILRNFYFINRLTGYLRNSGGPALFKSSFPPGSEVQLVESGGGLVQPGNSLRLSCAASGFTFSKFGMSWVRQAPGKGLEWVSSISGSGRDTLYAESVKGRFTISRDNAKTTLYLQMNSLRPEDTAVYYCTIGGSLSVSSQGTLVTVSS

SEQ ID NO: 569 - protein, 426 aa, Artificial Sequence
  source: /note="Description of Artificial Sequence: Synthetic polypeptide"
EVQLVESGGGLVQPGNSLRLSCAASGFTFSKFGMSWVRQAPGKGLEWVSSISGSGRDTLYAESVKGRFTISRDNAKTTLYLQMNSLRPEDTAVYYCTIGGSLSVSSQGTLVTVSSSGGPGPAGLYAQPGSMSYNLLGFLQRSSNFQSQKLLWQLNGRLEYCLKDRMNFDIPEEIKQLQQFQKEDAALTIYEMLQNIFAIFRQDSSSTGWNETIVENLLANVYHQINHLKTVLEEKLEKEDFTRGKLMSSLHLKRYYGRILHYLKAKEYSHCAWTIVRVEILRNFYFINRLTGYLRNSGGPGPAGLYAQPGSEVQLVESGGGLVQPGNSLRLSCAASGFTFSKFGMSWVRQAPGKGLEWVSSISGSGRDTLYAESVKGRFTISRDNAKTTLYLQMNSLRPEDTAVYYCTIGGSLSVSSQGTLVTVSS

SEQ ID NO: 570 - protein, 426 aa, Artificial Sequence
  source: /note="Description of Artificial Sequence: Synthetic polypeptide"
EVQLVESGGGLVQPGNSLRLSCAASGFTFSKFGMSWVRQAPGKGLEWVSSISGSGRDTLYAESVKGRFTISRDNAKTTLYLQMNSLRPEDTAVYYCTIGGSLSVSSQGTLVTVSSSGGPALFKSSFPPGSMSYNLLGFLQRSSNFQSQKLLWQLNGRLEYCLKDRMNFDIPEEIKQLQQFQKEDAALTIYEMLQNIFAIFRQDSSSTGWNETIVENLLANVYHQINHLKTVLEEKLEKEDFTRGKLMSSLHLKRYYGRILHYLKAKEYSHCAWTIVRVEILRNFYFINRLTGYLRNSGGPALFKSSFPPGSEVQLVESGGGLVQPGNSLRLSCAASGFTFSKFGMSWVRQAPGKGLEWVSSISGSGRDTLYAESVKGRFTISRDNAKTTLYLQMNSLRPEDTAVYYCTIGGSLSVSSQGTLVTVSS

SEQ ID NO: 571 - protein, 167 aa, Artificial Sequence
  source: /note="Description of Artificial Sequence: Synthetic polypeptide"
INYKQLQLQERTNIRKCQELLEQLNGKINLTYRADFKIPMEMTEKMQKSYTAFAIQEMLQNVFLVFRNNFSSTGWNETIVVRLLDELHQQTVFLKTVLEEKQEERLTWEMSSTALHLKSYYWRVQRYLKLMKYNSYAWMVVRAEIFRNFLIIRRLTRNFQNHHHHHH

SEQ ID NO: 572 - protein, 167 aa, Artificial Sequence
  source: /note="Description of Artificial Sequence: Synthetic polypeptide"
INYKQLQLQERTNIRKSQELLEQLNGKINLTYRADFKIPMEMTEKMQKSYTAFAIQEMLQNVFLVFRNNFSSTGWNETIVVRLLDELHQQTVFLKTVLEEKQEERLTWEMSSTALHLKSYYWRVQRYLKLMKYNSYAWMVVRAEIFRNFLIIRRLTRNFQNHHHHHH

SEQ ID NO: 573 - protein, 172 aa, Artificial Sequence
  source: /note="Description of Artificial Sequence: Synthetic polypeptide"
MSYNLLGFLQRSSNFQCQKLLWQLNGRLEYCLKDRMNFDIPEEIKQLQQFQKEDAALTIYEMLQNIFAIFRQDSSSTGWNETIVENLLANVYHQINHLKTVLEEKLEKEDFTRGKLMSSLHLKRYYGRILHYLKAKEYSHCAWTIVRVEILRNFYFINRLTGYLRNHHHHHH

SEQ ID NO: 574 - protein, 172 aa, Artificial Sequence
  source: /note="Description of Artificial Sequence: Synthetic polypeptide"
MSYNLLGFLQRSSNFQSQKLLWQLNGRLEYCLKDRMNFDIPEEIKQLQQFQKEDAALTIYEMLQNIFAIFRQDSSSTGWNETIVENLLANVYHQINHLKTVLEEKLEKEDFTRGKLMSSLHLKRYYGRILHYLKAKEYSHCAWTIVRVEILRNFYFINRLTGYLRNHHHHHH

SEQ ID NO: 575 - protein, 426 aa, Artificial Sequence
  source: /note="Description of Artificial Sequence: Synthetic polypeptide"
EVQLVESGGGLVQPGNSLRLSCAASGFTFSKFGMSWVRQAPGKGLEWVSSISGSGRDTLYAESVKGRFTISRDNAKTTLYLQMNSLRPEDTAVYYCTIGGSLSVSSQGTLVTVSSSGGPGPAGLYAQPGSMSYNLLGFLQRSSNFQCQKLLWQLNGRLEYCLKDRMNFDIPEEIKQLQQFQKEDAALTIYEMLQNIFAIFRQDSSSTGWQETIVENLLANVYHQINHLKTVLEEKLEKEDFTRGKLMSSLHLKRYYGRILHYLKAKEYSHCAWTIVRVEILRNFYFINRLTGYLRNSGGPGPAGLYAQPGSEVQLVESGGGLVQPGNSLRLSCAASGFTFSKFGMSWVRQAPGKGLEWVSSISGSGRDTLYAESVKGRFTISRDNAKTTLYLQMNSLRPEDTAVYYCTIGGSLSVSSQGTLVTVSS

SEQ ID NO: 576 - protein, 426 aa, Artificial Sequence
  source: /note="Description of Artificial Sequence: Synthetic polypeptide"
EVQLVESGGGLVQPGNSLRLSCAASGFTFSKFGMSWVRQAPGKGLEWVSSISGSGRDTLYAESVKGRFTISRDNAKTTLYLQMNSLRPEDTAVYYCTIGGSLSVSSQGTLVTVSSSGGPGPAGLYAQPGSMSYNLLGFLQRSSNFQSQKLLWQLNGRLEYCLKDRMNFDIPEEIKQLQQFQKEDAALTIYEMLQNIFAIFRQDSSSTGWQETIVENLLANVYHQINHLKTVLEEKLEKEDFTRGKLMSSLHLKRYYGRILHYLKAKEYSHCAWTIVRVEILRNFYFINRLTGYLRNSGGPGPAGLYAQPGSEVQLVESGGGLVQPGNSLRLSCAASGFTFSKFGMSWVRQAPGKGLEWVSSISGSGRDTLYAESVKGRFTISRDNAKTTLYLQMNSLRPEDTAVYYCTIGGSLSVSSQGTLVTVSS

SEQ ID NO: 577 - protein, 172 aa, Artificial Sequence
  source: /note="Description of Artificial Sequence: Synthetic polypeptide"
MSYNLLGFLQRSSNFQCQKLLWQLNGRLEYCLKDRMNFDIPEEIKQLQQFQKEDAALTIYEMLQNIFAIFRQDSSSTGWQETIVENLLANVYHQINHLKTVLEEKLEKEDFTRGKLMSSLHLKRYYGRILHYLKAKEYSHCAWTIVRVEILRNFYFINRLTGYLRNHHHHHH

SEQ ID NO: 578 - protein, 172 aa, Artificial Sequence
  source: /note="Description of Artificial Sequence: Synthetic polypeptide"
MSYNLLGFLQRSSNFQSQKLLWQLNGRLEYCLKDRMNFDIPEEIKQLQQFQKEDAALTIYEMLQNIFAIFRQDSSSTGWQETIVENLLANVYHQINHLKTVLEEKLEKEDFTRGKLMSSLHLKRYYGRILHYLKAKEYSHCAWTIVRVEILRNFYFINRLTGYLRNHHHHHH

SEQ ID NO: 579 - protein, 528 aa, Artificial Sequence
  source: /note="Description of Artificial Sequence: Synthetic polypeptide"
APTSSSTKKTQLQLEHLLLDLQMILNGINNYKNPKLTRMLTFKFYMPKKATELKHLQCLEEELKPLEEVLNLAQSKNFHLRPRDLISNINVIVLELKGSETTFMCEYADETATIVEFLNRWITFCQSIISTLTSGGPGGGGSGGGPGSEVQLVESGGGLVQPGNSLRLSCAASGFTFSKFGMSWVRQAPGKGLEWVSSISGSGRDTLYAESVKGRFTISRDNAKTTLYLQMNSLRPEDTAVYYCTIGGSLSVSSQGTLVTVSSGGGGSGGGGSGGGGSGGGGSGGGGSGGGGSSGGPGGGGSGGGPGSEVQLVESGGGLVQPGGSLRLSCAASGFTFSSYTLAWVRQAPGKGLEWVAAIDSSSYTYSPDTVRGRFTISRDNAKNSLYLQMNSLRAEDTAVYYCARDSNWDALDYWGQGTTVTVSSASTKGPSVFPLAPSSKSTSGGTAALGCLVKDYFPEPVTVSWNSGALTSGVHTFPAVLQSSGLYSLSSVVTVPSSSLGTQTYICNVNHKPSNTKVDKRVEPKSC

SEQ ID NO: 580 - protein, 528 aa, Artificial Sequence
  source: /note="Description of Artificial Sequence: Synthetic polypeptide"
APTSSSTKKTQLQLEHLLLDLQMILNGINNYKNPKLTRMLTFKFYMPKKATELKHLQCLEEELKPLEEVLNLAQSKNFHLRPRDLISNINVIVLELKGSETTFMCEYADETATIVEFLNRWITFCQSIISTLTSGGPGPAGMKGLPGSEVQLVESGGGLVQPGNSLRLSCAASGFTFSKFGMSWVRQAPGKGLEWVSSISGSGRDTLYAESVKGRFTISRDNAKTTLYLQMNSLRPEDTAVYYCTIGGSLSVSSQGTLVTVSSGGGGSGGGGSGGGGSGGGGSGGGGSGGGGSGGGGSGGGGSGGGGSEVQLVESGGGLVQPGGSLRLSCAASGFTFSSYTLAWVRQAPGKGLEWVAAIDSSSYTYSPDTVRGRFTISRDNAKNSLYLQMNSLRAEDTAVYYCARDSNWDALDYWGQGTTVTVSSASTKGPSVFPLAPSSKSTSGGTAALGCLVKDYFPEPVTVSWNSGALTSGVHTFPAVLQSSGLYSLSSVVTVPSSSLGTQTYICNVNHKPSNTKVDKRVEPKSC

SEQ ID NO: 581 - protein, 528 aa, Artificial Sequence
  source: /note="Description of Artificial Sequence: Synthetic polypeptide"
APTSSSTKKTQLQLEHLLLDLQMILNGINNYKNPKLTRMLTFKFYMPKKATELKHLQCLEEELKPLEEVLNLAQSKNFHLRPRDLISNINVIVLELKGSETTFMCEYADETATIVEFLNRWITFCQSIISTLTSGGPGPAGLYAQPGSEVQLVESGGGLVQPGNSLRLSCAASGFTFSKFGMSWVRQAPGKGLEWVSSISGSGRDTLYAESVKGRFTISRDNAKTTLYLQMNSLRPEDTAVYYCTIGGSLSVSSQGTLVTVSSGGGGSGGGGSGGGGSGGGGSGGGGSGGGGSGGGGSGGGGSGGGGSEVQLVESGGGLVQPGGSLRLSCAASGFTFSSYTLAWVRQAPGKGLEWVAAIDSSSYTYSPDTVRGRFTISRDNAKNSLYLQMNSLRAEDTAVYYCARDSNWDALDYWGQGTTVTVSSASTKGPSVFPLAPSSKSTSGGTAALGCLVKDYFPEPVTVSWNSGALTSGVHTFPAVLQSSGLYSLSSVVTVPSSSLGTQTYICNVNHKPSNTKVDKRVEPKSC

SEQ ID NO: 582 - protein, 528 aa, Artificial Sequence
  source: /note="Description of Artificial Sequence: Synthetic polypeptide"
APTSSSTKKTQLQLEHLLLDLQMILNGINNYKNPKLTRMLTFKFYMPKKATELKHLQCLEEELKPLEEVLNLAQSKNFHLRPRDLISNINVIVLELKGSETTFMCEYADETATIVEFLNRWITFCQSIISTLTSGGPALFKSSFPPGSEVQLVESGGGLVQPGNSLRLSCAASGFTFSKFGMSWVRQAPGKGLEWVSSISGSGRDTLYAESVKGRFTISRDNAKTTLYLQMNSLRPEDTAVYYCTIGGSLSVSSQGTLVTVSSGGGGSGGGGSGGGGSGGGGSGGGGSGGGGSGGGGSGGGGSGGGGSEVQLVESGGGLVQPGGSLRLSCAASGFTFSSYTLAWVRQAPGKGLEWVAAIDSSSYTYSPDTVRGRFTISRDNAKNSLYLQMNSLRAEDTAVYYCARDSNWDALDYWGQGTTVTVSSASTKGPSVFPLAPSSKSTSGGTAALGCLVKDYFPEPVTVSWNSGALTSGVHTFPAVLQSSGLYSLSSVVTVPSSSLGTQTYICNVNHKPSNTKVDKRVEPKSC

SEQ ID NO: 583 - protein, 226 aa, Artificial Sequence
  source: /note="Description of Artificial Sequence: Synthetic polypeptide"
EVQLVESGGGLVQPGGSLRLSCAASGFTFSSYTLAWVRQAPGKGLEWVAAIDSSSYTYSPDTVRGRFTISRDNAKNSLYLQMNSLRAEDTAVYYCARDSNWDALDYWGQGTTVTVSSASTKGPSVFPLAPSSKSTSGGTAALGCLVKDYFPEPVTVSWNSGALTSGVHTFPAVLQSSGLYSLSSVVTVPSSSLGTQTYICNVNHKPSNTKVDKRVEPKSCHHHHHH

SEQ ID NO: 584 - protein, 269 aa, Artificial Sequence
  source: /note="Description of Artificial Sequence: Synthetic polypeptide"
APTSSSTKKTQLQLEHLLLDLQMILNGINNYKNPKLTRMLTFKFYMPKKATELKHLQCLEEELKPLEEVLNLAQSKNFHLRPRDLISNINVIVLELKGSETTFMCEYADETATIVEFLNRWITFCQSIISTLTSGGPGPAGMKGLPGSEVQLVESGGGLVQPGNSLRLSCAASGFTFSKFGMSWVRQAPGKGLEWVSSISGSGRDTLYAESVKGRFTISRDNAKTTLYLQMNSLRPEDTAVYYCTIGGSLSVSSQGTLVTVSSHHHHHH

SEQ ID NO: 585 - protein, 137 aa, Artificial Sequence; identical to SEQ ID NO: 232
  source: /note="Description of Artificial Sequence: Synthetic polypeptide"

SEQ ID NO: 586 - protein, 137 aa, Artificial Sequence; identical to SEQ ID NO: 233
  source: /note="Description of Artificial Sequence: Synthetic polypeptide"

SEQ ID NO: 587 - protein, 138 aa, Artificial Sequence; identical to SEQ ID NO: 234
  source: /note="Description of Artificial Sequence: Synthetic polypeptide"

SEQ ID NO: 588 - protein, 138 aa, Artificial Sequence; identical to SEQ ID NO: 236
  source: /note="Description of Artificial Sequence: Synthetic polypeptide"

SEQ ID NO: 589 - protein, 138 aa, Artificial Sequence; identical to SEQ ID NO: 237
  source: /note="Description of Artificial Sequence: Synthetic polypeptide"

SEQ ID NO: 590 - protein, 138 aa, Artificial Sequence; identical to SEQ ID NO: 238
  source: /note="Description of Artificial Sequence: Synthetic polypeptide"

SEQ ID NO: 591 - protein, 138 aa, Artificial Sequence; identical to SEQ ID NO: 239
  source: /note="Description of Artificial Sequence: Synthetic polypeptide"

SEQ ID NO: 592 - protein, 138 aa, Artificial Sequence; identical to SEQ ID NO: 240
  source: /note="Description of Artificial Sequence: Synthetic polypeptide"

SEQ ID NO: 593 - protein, 138 aa, Artificial Sequence; identical to SEQ ID NO: 241
  source: /note="Description of Artificial Sequence: Synthetic polypeptide"

SEQ ID NO: 594 - protein, 137 aa, Artificial Sequence; identical to SEQ ID NO: 242
  source: /note="Description of Artificial Sequence: Synthetic polypeptide"

SEQ ID NO: 595 - protein, 137 aa, Artificial Sequence; identical to SEQ ID NO: 243
  source: /note="Description of Artificial Sequence: Synthetic polypeptide"

SEQ ID NO: 596 - protein, 137 aa, Artificial Sequence; identical to SEQ ID NO: 244
  source: /note="Description of Artificial Sequence: Synthetic polypeptide"

SEQ ID NO: 597 - protein, 137 aa, Artificial Sequence; identical to SEQ ID NO: 245
  source: /note="Description of Artificial Sequence: Synthetic polypeptide"

SEQ ID NO: 598 - protein, 137 aa, Artificial Sequence; identical to SEQ ID NO: 246
  source: /note="Description of Artificial Sequence: Synthetic polypeptide"

SEQ ID NO: 599 - protein, 137 aa, Artificial Sequence; identical to SEQ ID NO: 247
  source: /note="Description of Artificial Sequence: Synthetic polypeptide"

SEQ ID NO: 600 - protein, 137 aa, Artificial Sequence; identical to SEQ ID NO: 248
  source: /note="Description of Artificial Sequence: Synthetic polypeptide"

SEQ ID NO: 601 - protein, 137 aa, Artificial Sequence; identical to SEQ ID NO: 249
  source: /note="Description of Artificial Sequence: Synthetic polypeptide"

SEQ ID NO: 602 - protein, 137 aa, Artificial Sequence; identical to SEQ ID NO: 250
  source: /note="Description of Artificial Sequence: Synthetic polypeptide"

SEQ ID NO: 603 - protein, 137 aa, Artificial Sequence; identical to SEQ ID NO: 251
  source: /note="Description of Artificial Sequence: Synthetic polypeptide"

SEQ ID NO: 604 - protein, 137 aa, Artificial Sequence; identical to SEQ ID NO: 252
  source: /note="Description of Artificial Sequence: Synthetic polypeptide"

SEQ ID NO: 605 - protein, 137 aa, Artificial Sequence; identical to SEQ ID NO: 253
  source: /note="Description of Artificial Sequence: Synthetic polypeptide"

SEQ ID NO: 606 - protein, 137 aa, Artificial Sequence; identical to SEQ ID NO: 254
  source: /note="Description of Artificial Sequence: Synthetic polypeptide"

SEQ ID NO: 607 - protein, 137 aa, Artificial Sequence; identical to SEQ ID NO: 255
  source: /note="Description of Artificial Sequence: Synthetic polypeptide"

SEQ ID NO: 608 - protein, 137 aa, Artificial Sequence; identical to SEQ ID NO: 256
  source: /note="Description of Artificial Sequence: Synthetic polypeptide"

SEQ ID NO: 609 - protein, 8 aa, Artificial Sequence
  source: /note="Description of Artificial Sequence: Synthetic peptide"
GPAGLYAQ

SEQ ID NO: 610 - protein, 8 aa, Artificial Sequence
  source: /note="Description of Artificial Sequence: Synthetic peptide"
GPAGMKGL

SEQ ID NO: 611 - protein, 8 aa, Artificial Sequence
  source: /note="Description of Artificial Sequence: Synthetic peptide"
PGGPAGIG

SEQ ID NO: 612 - protein, 8 aa, Artificial Sequence
  source: /note="Description of Artificial Sequence: Synthetic peptide"
ALFKSSFP

SEQ ID NO: 613 - protein, 8 aa, Artificial Sequence
  source: /note="Description of Artificial Sequence: Synthetic peptide"
ALFFSSPP

SEQ ID NO: 614 - protein, 8 aa, Artificial Sequence
  source: /note="Description of Artificial Sequence: Synthetic peptide"
LAQRLRSS

SEQ ID NO: 615 - protein, 8 aa, Artificial Sequence
  source: /note="Description of Artificial Sequence: Synthetic peptide"
LAQKLKSS

SEQ ID NO: 616 - protein, 30 aa, Artificial Sequence
  source: /note="Description of Artificial Sequence: Synthetic polypeptide"
GALFKSSFPSGGGPAGLYAQGGSGKGGSGK

SEQ ID NO: 617 - protein, 30 aa, Artificial Sequence
  source: /note="Description of Artificial Sequence: Synthetic polypeptide"
RGSGGGPAGLYAQGSGGGPAGLYAQGGSGK

SEQ ID NO: 618 - protein, 30 aa, Artificial Sequence
  source: /note="Description of Artificial Sequence: Synthetic polypeptide"
KGGGPAGLYAQGPAGLYAQGPAGLYAQGSR

SEQ ID NO: 619 - protein, 30 aa, Artificial Sequence
  source: /note="Description of Artificial Sequence: Synthetic polypeptide"
RGGPAGLYAQGGPAGLYAQGGGPAGLYAQK

SEQ ID NO: 620 - protein, 30 aa, Artificial Sequence
  source: /note="Description of Artificial Sequence: Synthetic polypeptide"
KGGALFKSSFPGGPAGIGPLAQKLKSSGGS

SEQ ID NO: 621 - protein, 30 aa, Artificial Sequence
  source: /note="Description of Artificial Sequence: Synthetic polypeptide"
SGGPGGPAGIGALFKSSFPLAQKLKSSGGG

SEQ ID NO: 622 - protein, 30 aa, Artificial Sequence
  source: /note="Description of Artificial Sequence: Synthetic polypeptide"
RGPLAQKLKSSALFKSSFPGGPAGIGGGGK

SEQ ID NO: 623 - protein, 30 aa, Artificial Sequence
  source: /note="Description of Artificial Sequence: Synthetic polypeptide"
GGGALFKSSFPLAQKLKSSPGGPAGIGGGR

SEQ ID NO: 624 - protein, 30 aa, Artificial Sequence
  source: /note="Description of Artificial Sequence: Synthetic polypeptide"
RGPGGPAGIGPLAQKLKSSALFKSSFPGGG

SEQ ID NO: 625 - protein, 30 aa, Artificial Sequence
  source: /note="Description of Artificial Sequence: Synthetic polypeptide"
RGGPLAQKLKSSPGGPAGIGALFKSSFPGK

SEQ ID NO: 626 - protein, 30 aa, Artificial Sequence
  source: /note="Description of Artificial Sequence: Synthetic polypeptide"
RSGGPAGLYAQALFKSSFPLAQKLKSSGGG

SEQ ID NO: 627 - protein, 30 aa, Artificial Sequence
  source: /note="Description of Artificial Sequence: Synthetic polypeptide"
GGPLAQKLKSSALFKSSFPGPAGLYAQGGR

SEQ ID NO: 628 - protein, 30 aa, Artificial Sequence
  source: /note="Description of Artificial Sequence: Synthetic polypeptide"
GGALFKSSFPGPAGLYAQPLAQKLKSSGGK

SEQ ID NO: 629 - protein, 30 aa, Artificial Sequence
  source: /note="Description of Artificial Sequence: Synthetic polypeptide"
RGGALFKSSFPLAQKLKSSGPAGLYAQGGK

SEQ ID NO: 630 - protein, 30 aa, Artificial Sequence
  source: /note="Description of Artificial Sequence: Synthetic polypeptide"
RGGGPAGLYAQPLAQKLKSSALFKSSFPGG

SEQ ID NO: 631 - protein, 30 aa, Artificial Sequence
  source: /note="Description of Artificial Sequence: Synthetic polypeptide"
SGPLAQKLKSSGPAGLYAQALFKSSFPGSK

SEQ ID NO: 632 - protein, 30 aa, Artificial Sequence
  source: /note="Description of Artificial Sequence: Synthetic polypeptide"
KGGPGGPAGIGPLAQRLRSSALFKSSFPGR

SEQ ID NO: 633 - protein, 30 aa, Artificial Sequence
  source: /note="Description of Artificial Sequence: Synthetic polypeptide"
KSGPGGPAGIGALFFSSPPLAQKLKSSGGR

SEQ ID NO: 634 - protein, 30 aa, Artificial Sequence
  source: /note="Description of Artificial Sequence: Synthetic polypeptide"
SGGFPRSGGSFNPRTFGSKRKRRGSRGGGG

SEQ ID NO: 635 - protein, 934 aa, Artificial Sequence
  source: /note="Description of Artificial Sequence: Synthetic polypeptide"
EVQLVESGGGLVQPGNSLRLSCAASGFTFSKFGMSWVRQAPGKGLEWVSSISGSGRDTLYAESVKGRFTISRDNAKTTLYLQMNSLRPEDTAVYYCTIGGSLSVSSQGTLVTVSSSGGPALFKSSFPPGSIWELKKDVYVVELDWYPDAPGEMVVLTCDTPEEDGITWTLDQSSEVLGSGKTLTIQVKEFGDAGQYTCHKGGEVLSHSLLLLHKKEDGIWSTDILKDQKEPKNKTFLRCEAKNYSGRFTCWWLTTISTDLTFSVKSSRGSSDPQGVTCGAATLSAERVRGDNKEYEYSVECQEDSACPAAEESLPIEVMVDAVHKLKYENYTSSFFIRDIIKPDPPKNLQLKPLKNSRQVEVSWEYPDTWSTPHSYFSLTFCVQVQGKSKREKKDRVFTDKTSATVICRKNASISVRAQDRYYSSSWSEWASVPCSGGGGSGGGGSGGGGSRNLPVATPDPGMFPCLHHSQNLLRAVSNMLQKARQTLEFYPCTSEEIDHEDITKDKTSTVEACLPLELTKNESCLNSRETSFITNGSCLASRKTSFMMALCLSSIYEDLKMYQVEFKTMNAKLLMDPKRQIFLDQNMLAVIDELMQALNFNSETVPQKSSLEEPDFYKTKIKLCILLHAFRIRAVTIDRVMSYLNASSGGPALFKSSFPPGSGGGGSGGGGSGGGGSGGGGSGGGGSGGGGSQSVLTQPPSVSGAPGQRVTISCSGSRSNIGSETVKWYQQLPGTAPKLLIYYNDQRPSGVPDRFSGSKSGTSASLAITGLQAEDEADYYCQSYDRYTHPALLFGTGTKVTVLGGGGSGGGGSGGGGSQVQLVESGGGVVQPGRSLRLSCAASGFTFSSYGMHWVRQAPGKGLEWVAFIRYEGSNKYYAESVKGRFTISRDNSKNTLYLQMNSLRAEDTAVYYCKTHGSHDNWGQGTMVTVSS

SEQ ID NO: 636 - protein, 553 aa, Artificial Sequence
  source: /note="Description of Artificial Sequence: Synthetic polypeptide"
APTSSSTKKTQLQLEHLLLDLQMILNGINNYKNPKLTRMLTFKFYMPKKATELKHLQCLEEELKPLEEVLNLAQSKNFHLRPRDLISNINVIVLELKGSETTFMCEYADETATIVEFLNRWITFCQSIISTLTSGGPGPAGMKGLPGSEVQLVESGGGLVQPGNSLRLSCAASGFTFSKFGMSWVRQAPGKGLEWVSSISGSGRDTLYAESVKGRFTISRDNAKTTLYLQMNSLRPEDTAVYYCTIGGSLSVSSQGTLVTVSSGGGGSGGGGSGGGGSGGGGSGGGGSGGGGSGGGGSGGGGSGGGGSEVQLVESGGGLVQPGGSLRLSCAASGFTFSSYTLAWVRQAPGKGLEWVAAIDSSSYTYSPDTVRGRFTISRDNAKNSLYLQMNSLRAEDTAVYYCARDSNWDALDYWGQGTTVTVSSGGGGSGGGGSGGGGSDIQMTQSPSSLSASVGDRVTITCKASQNVGTNVGWYQQKPGKAPKALIYSASFRYSGVPSRFSGSGSGTDFTLTISSLQPEDFATYYCQQYYTYPYTFGGGTKVEIKHHHHHH

SEQ ID NO: 637 - protein, 665 aa, Artificial Sequence
  source: /note="Description of Artificial Sequence: Synthetic polypeptide"
APTSSSTKKTQLQLEHLLLDLQMILNGINNYKNPKLTRMLTFKFYMPKKATELKHLQCLEEELKPLEEVLNLAQSKNFHLRPRDLISNINVIVLELKGSETTFMCEYADETATIVEFLNRWITFCQSIISTLTSGGPGPAGMKGLPGSVPRDCGCKPCICTVPEVSSVFIFPPKPKDVLTITLTPKVTCVVVDISKDDPEVQFSWFVDDVEVHTAQTQPREEQFNSTFRSVSELPIMHQDWLNGKEFKCRVNSAAFPAPIEKTISKTKGRPKAPQVYTIPPPKEQMAKDKVSLTCMITDFFPEDITVEWQWNGQPAENYKNTQPIMDTDGSYFVYSKLNVQKSNWEAGNTFTCSVLHEGLHNHHTEKSLSHSPGKGGGGSGGGGSGGGGSGGGGSGGGGSGGGGSSGGPGPAGMKGLPGSEVQLVESGGGLVQPGGSLRLSCAASGFTFSSYTLAWVRQAPGKGLEWVAAIDSSSYTYSPDTVRGRFTISRDNAKNSLYLQMNSLRAEDTAVYYCARDSNWDALDYWGQGTTVTVSSGGGGSGGGGSGGGGSDIQMTQSPSSLSASVGDRVTITCKASQNVGTNVGWYQQKPGKAPKALIYSASFRYSGVPSRFSGSGSGTDFTLTISSLQPEDFATYYCQQYYTYPYTFGGGTKVEIKHHHHHH

SEQ ID NO: 638 - protein, 665 aa, Artificial Sequence
  source: /note="Description of Artificial Sequence: Synthetic polypeptide"
APTSSSTKKTQLQLEHLLLDLQMILNGINNYKNPKLTRMLTFKFYMPKKATELKHLQCLEEELKPLEEVLNLAQSKNFHLRPRDLISNINVIVLELKGSETTFMCEYADETATIVEFLNRWITFCQSIISTLTSGGPGPAGMKGLPGSGGGGSGGGGSGGGGSGGGGSGGGGSGGGGSEVQLVESGGGLVQPGGSLRLSCAASGFTFSSYTLAWVRQAPGKGLEWVAAIDSSSYTYSPDTVRGRFTISRDNAKNSLYLQMNSLRAEDTAVYYCARDSNWDALDYWGQGTTVTVSSGGGGSGGGGSGGGGSDIQMTQSPSSLSASVGDRVTITCKASQNVGTNVGWYQQKPGKAPKALIYSASFRYSGVPSRFSGSGSGTDFTLTISSLQPEDFATYYCQQYYTYPYTFGGGTKVEIKSGGPGPAGMKGLPGSVPRDCGCKPCICTVPEVSSVFIFPPKPKDVLTITLTPKVTCVVVDISKDDPEVQFSWFVDDVEVHTAQTQPREEQFNSTFRSVSELPIMHQDWLNGKEFKCRVNSAAFPAPIEKTISKTKGRPKAPQVYTIPPPKEQMAKDKVSLTCMITDFFPEDITVEWQWNGQPAENYKNTQPIMDTDGSYFVYSKLNVQKSNWEAGNTFTCSVLHEGLHNHHTEKSLSHSPGKHHHHHH

SEQ ID NO: 639 - protein, 558 aa, Artificial Sequence
  source: /note="Description of Artificial Sequence: Synthetic polypeptide"
APTSSSTKKTQLQLEHLLLDLQMILNGINNYKNPKLTRMLTFKFYMPKKATELKHLQCLEEELKPLEEVLNLAQSKNFHLRPRDLISNINVIVLELKGSETTFMCEYADETATIVEFLNRWITFCQSIISTLTGGGSGGGSGGGSGGGSEVQLVESGGGLVQPGNSLRLSCAASGFTFSKFGMSWVRQAPGKGLEWVSSISGSGRDTLYAESVKGRFTISRDNAKTTLYLQMNSLRPEDTAVYYCTIGGSLSVSSQGTLVTVSSGGGGSGGGGSGGGGSGGGGSGGGGSGGGGSSGGPGPAGMKGLPGSEVQLVESGGGLVQPGGSLRLSCAASGFTFSSYTLAWVRQAPGKGLEWVAAIDSSSYTYSPDTVRGRFTISRDNAKNSLYLQMNSLRAEDTAVYYCARDSNWDALDYWGQGTTVTVSSGGGGSGGGGSGGGGSDIQMTQSPSSLSASVGDRVTITCKASQNVGTNVGWYQQKPGKAPKALIYSASFRYSGVPSRFSGSGSGTDFTLTISSLQPEDFATYYCQQYYTYPYTFGGGTKVEIKHHHHHHEPEA

SEQ ID NO: 640 - protein, 273 aa, Artificial Sequence
  source: /note="Description of Artificial Sequence: Synthetic polypeptide"
APTSSSTKKTQLQLEHLLLDLQMILNGINNYKNPKLTRMLTFKFYMPKKATELKHLQCLEEELKPLEEVLNLAQSKNFHLRPRDLISNINVIVLELKGSETTFMCEYADETATIVEFLNRWITFCQSIISTLTSGGPGPAGMKGLPGSEVQLVESGGGLVQPGNSLRLSCAASGFTFSKFGMSWVRQAPGKGLEWVSSISGSGRDTLYAESVKGRFTISRDNAKTTLYLQMNSLRPEDTAVYYCTIGGSLSVSSQGTLVTVSSHHHHHHEPEA

SEQ ID NO: 641 - protein, 659 aa, Artificial Sequence
  source: /note="Description of Artificial Sequence: Synthetic polypeptide"
VPRDCGCKPCICTVPEVSSVFIFPPKPKDVLTITLTPKVTCVVVDISKDDPEVQFSWFVDDVEVHTAQTQPREEQFNSTFRSVSELPIMHQDWLNGKEFKCRVNSAAFPAPIEKTISKTKGRPKAPQVYTIPPPKEQMAKDKVSLTCMITDFFPEDITVEWQWNGQPAENYKNTQPIMDTDGSYFVYSKLNVQKSNWEAGNTFTCSVLHEGLHNHHTEKSLSHSPGKSGGPGPAGLYAQPGSAPTSSSTKKTQLQLEHLLLDLQMILNGINNYKNPKLTRMLTFKFYMPKKATELKHLQCLEEELKPLEEVLNLAQSKNFHLRPRDLISNINVIVLELKGSETTFMCEYADETATIVEFLNRWITFCQSIISTLTGGGGSGGGGSGGGGSGGGGSGGGGSGGGGSSGGPGPAGLYAQPGSEVQLVESGGGLVQPGGSLRLSCAASGFTFSSYTLAWVRQAPGKGLEWVAAIDSSSYTYSPDTVRGRFTISRDNAKNSLYLQMNSLRAEDTAVYYCARDSNWDALDYWGQGTTVTVSSSGGPGPAGLYAQPGSDIQMTQSPSSLSASVGDRVTITCKAREKLWSAVAWYQQKPGKAPKSLIYSASFRYSGVPSRFSGSGSGTDFTLTISSLQPEDFATYYCQQYYTYPYTFGGGTKVEIK

SEQ ID NO: 642 - protein, 659 aa, Artificial Sequence
  source: /note="Description of Artificial Sequence: Synthetic polypeptide"
VPRDCGCKPCICTVPEVSSVFIFPPKPKDVLTITLTPKVTCVVVDISKDDPEVQFSWFVDDVEVHTAQTQPREEQFNSTFRSVSELPIMHQDWLNGKEFKCRVNSAAFPAPIEKTISKTKGRPKAPQVYTIPPPKEQMAKDKVSLTCMITDFFPEDITVEWQWNGQPAENYKNTQPIMDTDGSYFVYSKLNVQKSNWEAGNTFTCSVLHEGLHNHHTEKSLSHSPGKSGGPGPAGLYAQPGSAPTSSSTKKTQLQLEHLLLDLQMILNGINNYKNPKLTRMLTFKFYMPKKATELKHLQCLEEELKPLEEVLNLAQSKNFHLRPRDLISNINVIVLELKGSETTFMCEYADETATIVEFLNRWITFCQSIISTLTGGGGSGGGGSGGGGSGGGGSGGGGSGGGGSSGGPGPAGLYAQPGSEVQLVESGGGLVQPGGSLRLSCAASGFTFSSYTLAWVRQAPGKGLEWVAAIDSSSYTYSPDTVRGRFTISRDNAKNSLYLQMNSLRAEDTAVYYCARDSNWDALDYWGQGTTVTVSSGGGGSGGGGSGGGGSDIQMTQSPSSLSASVGDRVTITCKAREKLWSAVAWYQQKPGKAPKSLIYSASFRYSGVPSRFSGSGSGTDFTLTISSLQPEDFATYYCQQYYTYPYTFGGGTKVEIK

SEQ ID NO: 643 - protein, 659 aa, Artificial Sequence
  source: /note="Description of Artificial Sequence: Synthetic polypeptide"
VPRDCGCKPCICTVPEVSSVFIFPPKPKDVLTITLTPKVTCVVVDISKDDPEVQFSWFVDDVEVHTAQTQPREEQFNSTFRSVSELPIMHQDWLNGKEFKCRVNSAAFPAPIEKTISKTKGRPKAPQVYTIPPPKEQMAKDKVSLTCMITDFFPEDITVEWQWNGQPAENYKNTQPIMDTDGSYFVYSKLNVQKSNWEAGNTFTCSVLHEGLHNHHTEKSLSHSPGKSGGPGPAGLYAQPGSAPTSSSTKKTQLQLEHLLLDLQMILNGINNYKNPKLTRMLTFKFYMPKKATELKHLQCLEEELKPLEEVLNLAQSKNFHLRPRDLISNINVIVLELKGSETTFMCEYADETATIVEFLNRWITFCQSIISTLTGGGGSGGGGSGGGGSGGGGSGGGGSGGGGSSGGPGPAGLYAQPGSEVQLVESGGGLVQPGGSLRLSCAASGFTFSSYTLAWVRQAPGKGLEWVAAIDSSSYTYSPDTVRGRFTISRDNAKNSLYLQMNSLRAEDTAVYYCARDSNWDALDYWGQGTTVTVSSSGGPGPAGLYAQPGSDIQMTQSPSSLSASVGDRVTITCKVTEKVWGNVAWYQQKPGKAPISLIYSPSLRKSGVPSRFSGSGSGTDFTLTISSLQPEDFATYYCQQYYTYPYTFGGGTKVEIK

SEQ ID NO: 644 - protein, 659 aa, Artificial Sequence
  source: /note="Description of Artificial Sequence: Synthetic polypeptide"
VPRDCGCKPCICTVPEVSSVFIFPPKPKDVLTITLTPKVTCVVVDISKDDPEVQFSWFVDDVEVHTAQTQPREEQFNSTFRSVSELPIMHQDWLNGKEFKCRVNSAAFPAPIEKTISKTKGRPKAPQVYTIPPPKEQMAKDKVSLTCMITDFFPEDITVEWQWNGQPAENYKNTQPIMDTDGSYFVYSKLNVQKSNWEAGNTFTCSVLHEGLHNHHTEKSLSHSPGKSGGPGPAGLYAQPGSAPTSSSTKKTQLQLEHLLLDLQMILNGINNYKNPKLTRMLTFKFYMPKKATELKHLQCLEEELKPLEEVLNLAQSKNFHLRPRDLISNINVIVLELKGSETTFMCEYADETATIVEFLNRWITFCQSIISTLTGGGGSGGGGSGGGGSGGGGSGGGGSGGGGSSGGPGPAGLYAQPGSEVQLVESGGGLVQPGGSLRLSCAASGFTFSSYTLAWVRQAPGKGLEWVAAIDSSSYTYSPDTVRGRFTISRDNAKNSLYLQMNSLRAEDTAVYYCARDSNWDALDYWGQGTTVTVSSGGGGSGGGGSGGGGSDIQMTQSPSSLSASVGDRVTITCKVTEKVWGNVAWYQQKPGKAPISLIYSPSLRKSGVPSRFSGSGSGTDFTLTISSLQPEDFATYYCQQYYTYPYTFGGGTKVEIK

SEQ ID NO: 645 - protein, 539 aa, Artificial Sequence
  source: /note="Description of Artificial Sequence: Synthetic polypeptide"
VPRDCGCKPCICTVPEVSSVFIFPPKPKDVLTITLTPKVTCVVVDISKDDPEVQFSWFVDDVEVHTAQTQPREEQFNSTFRSVSELPIMHQDWLNGKEFKCRVNSAAFPAPIEKTISKTKGRPKAPQVYTIPPPKEQMAKDKVSLTCMITDFFPEDITVEWQWNGQPAENYKNTQPIMDTDGSYFVYSKLNVQKSNWEAGNTFTCSVLHEGLHNHHTEKSLSHSPGKSGGPGPAGLYAQPGSAPTSSSTKKTQLQLEHLLLDLQMILNGINNYKNPKLTRMLTFKFYMPKKATELKHLQCLEEELKPLEEVLNLAQSKNFHLRPRDLISNINVIVLELKGSETTFMCEYADETATIVEFLNRWITFCQSIISTLTGGGGSGGGGSGGGGSGGGGSGGGGSGGGGSSGGPGPAGLYAQPGSEVQLLESGGGLVQPGGSLRLSCAASGSIFSANAMGWYRQAPGKGLELVAVISSGGSTNYADSVKGRFTISRDNSKNTVYLQMNSLRAEDTAVYYCMYSGSYYYTPNDYWGQGTLVTVSS

SEQ ID NO: 646 - protein, 538 aa, Artificial Sequence
  source: /note="Description of Artificial Sequence: Synthetic polypeptide"
VPRDCGCKPCICTVPEVSSVFIFPPKPKDVLTITLTPKVTCVVVDISKDDPEVQFSWFVDDVEVHTAQTQPREEQFNSTFRSVSELPIMHQDWLNGKEFKCRVNSAAFPAPIEKTISKTKGRPKAPQVYTIPPPKEQMAKDKVSLTCMITDFFPEDITVEWQWNGQPAENYKNTQPIMDTDGSYFVYSKLNVQKSNWEAGNTFTCSVLHEGLHNHHTEKSLSHSPGKSGGPGPAGLYAQPGSAPTSSSTKKTQLQLEHLLLDLQMILNGINNYKNPKLTRMLTFKFYMPKKATELKHLQCLEEELKPLEEVLNLAQSKNFHLRPRDLISNINVIVLELKGSETTFMCEYADETATIVEFLNRWITFCQSIISTLTGGGGSGGGGSGGGGSGGGGSGGGGSGGGGSSGGPGPAGLYAQPGSEVQLLESGGGLVQPGGSLRLSCAASERIFSTDVMGWYRQAPGKQRELVAVVSARGTTNYLDAVKGRFTISRDNSKNTLYLQMNSLRAEDTAVYYCYVRETTSPWRIYWGQGTLVTVSS

SEQ ID NO: 647 - protein, 930 aa, Artificial Sequence
  source: /note="Description of Artificial Sequence: Synthetic polypeptide"
EVQLVESGGGLVQPGNSLRLSCAASGFTFSKFGMSWVRQAPGKGLEWVSSISGSGRDTLYAESVKGRFTISRDNAKTTLYLQMNSLRPEDTAVYYCTIGGSLSVSSQGTLVTVSSSGGPGPAGLYAQPGSIWELKKDVYVVELDWYPDAPGEMVVLTCDTPEEDGITWTLDQSSEVLGSGKTLTIQVKEFGDAGQYTCHKGGEVLSHSLLLLHKKEDGIWSTDILKDQKEPKNKTFLRCEAKNYSGRFTCWWLTTISTDLTFSVKSSRGSSDPQGVTCGAATLSAERVRGDNKEYEYSVECQEDSACPAAEESLPIEVMVDAVHKLKYENYTSSFFIRDIIKPDPPKNLQLKPLKNSRQVEVSWEYPDTWSTPHSYFSLTFCVQVQGKSKREKKDRVFTDKTSATVICRKNASISVRAQDRYYSSSWSEWASVPCSGGGGSGGGGSGGGGSRVIPVSGPARCLSQSRNLLKTTDDMVKTAREKLKHYSCTAEDIDHEDITRDQTSTLKTCLPLELHKNESCLATRETSSTTRGSCLPPQKTSLMMTLCLGSIYEDLKMYQTEFQAINAALQNHNHQQIILDKGMLVAIDELMQSLNHNGETLRQKPPVGEADPYRVKMKLCILLHAFSTRVVTINRVMGYLSSASGGPGPAGLYAQPGSGGGGSGGGGSGGGGSGGGGSGGGGSGGGGSQSVLTQPPSVSGAPGQRVTISCSGSRSNIGSNTVKWYQQLPGTAPKLLIYYNDQRPSGVPDRFSGSKSGTSASLAITGLQAEDEADYYCQSYDRYTHPALLFGTGTKVTVLGGGGSGGGGSGGGGSQVQLVESGGGVVQPGRSLRLSCAASGFTFSSYGMHWVRQAPGKGLEWVAFIRYDGSNKYYADSVKGRFTISRDNSKNTLYLQMNSLRAEDTAVYYCKTHGSHDNWGQGTMVTVSS

1. A pharmaceutical composition comprising:
(i) a fusion polypeptide comprising a cytokine polypeptide [A], a blocking moiety [D], optionally a half-life extension moiety [H] and a protease-cleavable polypeptide linker; and
(ii) a second therapeutic agent;
wherein the cytokine polypeptide and the blocking moiety and the optional half-life extension element when present are operably linked by the protease-cleavable polypeptide linker and the fusion polypeptide has attenuated cytokine receptor activating activity, wherein the cytokine-receptor activating activity of the fusion polypeptide is at least about 10× less than the cytokine receptor activating activity of the polypeptide that contains the cytokine polypeptide that is produced by cleavage of the protease cleavable linker.

2. The pharmaceutical composition of claim 1, wherein the cytokine polypeptide is selected from the group consisting of IL-2, IL-7, IL-12, IL-15, IL-18, IL-21, IL-23, TGF, interferon alpha, interferon beta, interferon gamma, TNF, TGFbeta, CXCL10, CCL19, CCL20, CCL21, or a mutein, a variant, an active fragment, or a subunit of any of the foregoing.

3-4. (canceled)

5. The pharmaceutical composition of claim 1, wherein the second therapeutic agent is a second fusion polypeptide comprising at least one of each of: a second cytokine polypeptide [A], a blocking moiety [D], optionally a half-life extension element [H] and a protease-cleavable polypeptide linker [L];
wherein the cytokine polypeptide and the cytokine blocking moiety and the optional half-life extension element when present are operably linked by the protease-cleavable polypeptide linker and the fusion polypeptide has attenuated cytokine receptor activating activity, wherein the cytokine-receptor activating activity of the fusion polypeptide is at least about 10× less than the cytokine receptor activating activity of the polypeptide that contains the cytokine polypeptide that is produced by cleavage of the protease cleavable linker.

6. The pharmaceutical composition of claim 5, wherein the second cytokine polypeptide is selected from the group consisting of IL-2, IL-7, IL-12, IL-15, IL-18, IL-21, IL-23, TGF, interferon alpha, interferon beta, interferon gamma, TNF, TGFbeta, CXCL10, CCL19, CCL20, CCL21, a mutein thereof and active fragments thereof.

7-8. (canceled)

9. The pharmaceutical composition of claim 5, wherein the first fusion polypeptide comprises a IL-2 polypeptide and the second fusion polypeptide comprises a different IL-2 polypeptide, a IL-12 polypeptide, an interferon alpha polypeptide, an interferon beta polypeptide, or a mutein, or an active fragment of any of the foregoing.

10. The pharmaceutical composition of elms claim 5, wherein the first fusion polypeptide comprises a IL-12 polypeptide and the second fusion polypeptide comprises a different IL-12 polypeptide, a IL-2 polypeptide, an interferon alpha polypeptide, an interferon beta polypeptide, or a mutein, or an active fragment of any of the foregoing.

11. The pharmaceutical composition of claim 5, wherein the first fusion polypeptide comprises a interferon alpha polypeptide or an interferon beta polypeptide and the second fusion polypeptide comprises a different interferon alpha polypeptide, a different interferon beta polypeptide, a IL-2 polypeptide, a IL-12 polypeptide, or a mutein, or an active fragment of any of the foregoing.

12. (canceled)

13. The pharmaceutical composition of claim 1, wherein the second therapeutic agent is an agent for treating cancer.

14. The pharmaceutical composition of claim 1, wherein the second therapeutic agent is an immunomodulator.

15. (canceled)

16. The pharmaceutical composition of claim 1, wherein each protease-cleavable polypeptide linker independently comprises a sequence that is capable of being cleaved by a protease selected from the group consisting of a kallikrein, thrombin, chymase, carboxypeptidase A, cathepsin G, cathepsin L, an elastase, PR-3, granzyme M, a calpain, a matrix metalloproteinase (MMP), an ADAM, a FAP, a cathepsin L, a plasminogen activator, a cathepsin, a caspase, a tryptase, and a tumor cell surface protease.

17. The pharmaceutical composition of claim 1, wherein the half-life extension element comprises a serum albumin binding domain, a serum albumin, transferrin, or immunoglobulin Fc, or fragment thereof.

18. The pharmaceutical composition of claim 1, wherein the blocking element comprises an antibody or antigen-binding fragment of an antibody that binds to the cytokine polypeptide.

19. The pharmaceutical composition of claim 1, wherein the fusion polypeptide comprises an amino acid sequence selected from the group consisting of SEQ ID NOs. 257-300, 302-317, 325-353, 355-365, 366, 372-381, 383-385, 388-420, 579-608, 636-646, 368-371, 434-440, 453-519, 523-538, 421-430, and 539-578.

20. The pharmaceutical composition of claim 1, wherein the second therapeutic agent is a second fusion polypeptide that comprises an amino acid sequence selected from the group consisting of SEQ ID NOs. 257-300, 302-317, 325-353, 355-365, 366, 372-381, 383-385, 388-420, 579-608, 636-646, 368-371, 434-440, 453-519, 523-538, 421-430, and 539-578, and wherein the fusion polypeptide and the second fusion polypeptide are not the same.

21-27. (canceled)

28. A fusion polypeptide comprising an amino acid sequence selected from the group consisting of SEQ ID NOs. 257-300, 302-317, 325-353, 355-365, 366, 372-381, 383-385, 388-420, 579-608, and 636-646 or an amino acid sequence that has at least about 80% identity to SEQ ID NOs. 257-300, 302-317, 325-353, 355-365, 366, 372-381, 383-385, 388-420, 579-608, and 636-646.

29-30. (canceled)

31. A fusion polypeptide comprising an amino acid sequence selected from the group consisting of SEQ ID NOs. 368-371, 434-440, 453-519, and 523-538, or an amino acid sequence that has at least about 80% identity to SEQ ID NOs. 368-371, 434-440, 453-519, and 523-538.

32. A fusion polypeptide comprising an amino acid sequence selected from the group consisting of SEQ ID NOs. 421-430, and 539-578, or an amino acid sequence that has at least 80% identity to SEQ ID NOs. 421-430, and 539-578.

33. (canceled)

34. A method for treating a cancer or a viral infection associated with cancer comprising administering to a subject in need thereof the pharmaceutical composition of claim 1.

35. A nucleic acid encoding the fusion polypeptide of claim 28.

36. A vector comprising the nucleic acid of claim 35.

37. A host cell comprising the vector of claim 36.

38-68. (canceled)

69. A method for treating a cancer or a viral infection associated with cancer comprising administering to a subject in need thereof one or more fusion polypeptides of claim 1.

70. A method for treating a cancer or a viral infection associated with cancer comprising administering to a subject in need thereof one or more fusion polypeptides of claim 28.

71. A method for treating a cancer or a viral infection associated with cancer comprising administering to a subject in need thereof one or more fusion polypeptides of claim 31.

72. A method for treating a cancer or a viral infection associated with cancer comprising administering to a subject in need thereof one or more fusion polypeptides of claim 32.

73. A nucleic acid encoding the fusion polypeptide claim 31.

74. A vector comprising the nucleic acid of claim 73.

75. A host cell comprising the vector of claim 74.

77. A nucleic acid encoding the fusion polypeptide of claim 32.

78. A vector comprising the nucleic acid of claim 77.

79. A host cell comprising the vector of claim 78.
